(19) United States
(12) Patent Application Publication
(10) Pub. No.: US 2025/0012785 A1
(43) Pub. Date: Jan. 9, 2025

(54) SYSTEMS AND METHODS FOR DETECTION AND QUANTIFICATION OF DOUBLE-STRANDED RNA

(71) Applicant: Promega Corporation, Madison, WI (US)

(72) Inventors: Jamison GRAILER, Madison, WI (US); Richard A. Moravec, Madison, WI (US); James R. Hartnett, Madison, WI (US); Mei Cong, Madison, WI (US)

(21) Appl. No.: 18/735,719

(22) Filed: Jun. 6, 2024

Related U.S. Application Data
(60) Provisional application No. 63/506,502, filed on Jun. 6, 2023.

(51) Int. Cl. G01N 33/53; C07K 14/435; C12N 9/02; C12N 9/12

(52) U.S. Cl. CPC G01N 33/5308; C07K 14/43595; C12N 9/0069; C12N 9/12; C12Y 113/12013; C12Y 207/11001; C07K 2319/60; C07K 2319/61; G01N 2470/06

(57) ABSTRACT

Provided herein are compositions comprising a double-stranded RNA (dsRNA) binding domains linked to components of a complementation system. Upon binding of a pair of dsRNA binding domains to a dsRNA, a detectable complex of the complementation components is formed, and the dsRNA can be detected/quantified.

### CROSS-REFERENCE TO RELATED APPLICATIONS

[0001] The present invention claims the priority benefit of U.S. Provisional Patent Application 63/506,502, filed Jun. 6, 2023, which is incorporated by reference in its entirety.

### SEQUENCE LISTING

[0002] The text of the computer readable sequence listing filed herewith titled “PRMG_41970_202_SequenceListing.xml,” created Jun. 5, 2024, having a file size of 3,253,101 bytes, is hereby incorporated by reference in its entirety.

### FIELD

[0003] Provided herein are compositions comprising a double-stranded RNA (dsRNA) binding domains linked to components of a complementation system. Upon binding of a pair of dsRNA binding domains to a dsRNA, a detectable complex of the complementation components is formed, and the dsRNA can be detected/quantified.

### BACKGROUND

[0004] Double-stranded RNA (dsRNA) is a byproduct and contaminant of in vitro mRNA transcription during, for example, production of mRNA-based therapeutics (vaccines, gene therapy). The FDA has issued a guidance document specifically focused on the development of RNA-based therapeutics, titled “Chemistry, Manufacturing, and Control (CMC) Information for Human Gene Therapy Investigational New Drug Applications (INDs)”. This guidance document provides recommendations for the development and characterization of RNA-based therapeutics, including considerations for the presence of dsRNA. Current guidance states that dsRNA needs to be measured for all in vitro transcribed RNA products. There is currently not a stated limit for the amount of dsRNA in RNA drug products.

[0005] Currently, quantitation of dsRNA (i.e., specific for dsRNA, not ssRNA or DNA) can be performed by two accepted methods, ELISA and dot blot. Enzyme-linked immunosorbent assay (ELISA) can be used to quantitate dsRNA using specific antibodies that recognize dsRNA. Sensitivity may be an issue as commercially available ELISA kits exhibit a sensitivity of 2-5 ng/ml. The accepted ELISA Ab clones are J2, K1, K2. However, despite being the current “gold standard” for dsRNA detection, there are recognized problems with these clones in the field. For example, clone J2 exhibits preferred binding to the ends of dsRNA oligos as well as an internal binding site of A2N9A3N9A2 (where adenine is presented on one face of the helix, see Bonin et al., RNA, 2000). Therefore, this antibody is not sequence agnostic and does not represent accurate quantitation of dsRNA. The other clone, K1, displays altered binding kinetics when testing dsRNA from different sources. Therefore, these clones do not provide true quantitation of dsRNA. Dot blots can be used for dsRNA detection although they are not as sensitive or quantitative as ELISA, and they rely on the same flawed antibody clones.

[0006] What is needed is a quantitative, sensitive (e.g., limit of detection <1 ng/ml), specific, rapid (<2 hours assay time), and easy to use (add-mix-read) assay for quantitating dsRNA.

### SUMMARY

[0007] Provided herein are compositions comprising a double-stranded RNA (dsRNA) binding domains linked to components of a complementation system. Upon binding of a pair of dsRNA binding domains to a dsRNA, a detectable complex of the complementation components is formed, and the dsRNA can be detected/quantified.

[0008] In some embodiments, provided herein are double-stranded RNA (dsRNA) detection systems comprising: (a) a first fusion of (i) a first dsRNA binding domain and (ii) a first component of a detectable complex; and (b) a second fusion of (i) a second dsRNA binding domain and (ii) a second component of the detectable complex. In some embodiments, upon binding of the first and second dsRNA binding domains to a dsRNA, the first and second components of the detectable complex associate to form the detectable complex. In some embodiments, the first and second components of the detectable complex exhibit low affinity for one another in the absence of facilitation through the binding of the first and second dsRNA binding domains to the dsRNA.

[0009] In some embodiments, the first dsRNA binding domain and the second dsRNA binding domain comprise different amino acid sequences. In some embodiments, the first dsRNA binding domain and the second dsRNA binding domain comprise the same amino acid sequences. In some embodiments, a dsRNA binding domain comprises a dsRNA binding motif having at least 70% (e.g., 70%, 75%, 80%, 85%, 90%, 95%, 100%, or ranges therebetween) sequence similarity with SEQ ID NO: 3062 and/or SEQ ID NO: 3063. In some embodiments, a dsRNA binding domain comprises a dsRNA binding motif having at least 70% (e.g., 70%, 75%, 80%, 85%, 90%, 95%, 100%, or ranges therebetween) sequence identity with SEQ ID NO: 3062 and/or SEQ ID NO: 3063. In some embodiments, a dsRNA binding domain comprises a dsRNA binding motif of SEQ ID NO: 3062. In some embodiments, a dsRNA binding domain comprises a dsRNA binding motif of SEQ ID NO: 3063. In some embodiments, a dsRNA binding domain comprises dsRNA binding motifs having at least 70% (e.g., 70%, 75%, 80%, 85%, 90%, 95%, 100%, or ranges therebetween) sequence similarity with SEQ ID NO: 3062 and SEQ ID NO: 3063. In some embodiments, a dsRNA binding domain comprises dsRNA binding motifs having at least 70% (e.g., 70%, 75%, 80%, 85%, 90%, 95%, 100%, or ranges therebetween) sequence identity with SEQ ID NO: 3062 and SEQ ID NO: 3063. In some embodiments, a dsRNA binding domain comprises dsRNA binding motifs of SEQ ID NO: 3062 and SEQ ID NO: 3063. In some embodiments, a dsRNA binding domain comprises at least 70% (e.g., 70%, 75%, 80%, 85%, 90%, 95%, 100%, or ranges therebetween) sequence similarity with SEQ ID NO: 3061. In some embodiments, a dsRNA binding domain comprises at least 70% (e.g., 70%, 75%, 80%, 85%, 90%, 95%, 100%, or ranges therebetween) sequence identity with SEQ ID NO: 3061. In some embodiments, a dsRNA binding domain comprises SEQ ID NO: 3061.

[0010] In some embodiments, the detectable complex is capable of generating a signal that can be detected. In some embodiments, the amount of signal generated by the detectable complex can be correlated to the amount of dsRNA in a sample with the system. In some embodiments, the signal comprises one or more of fluorescence, luminescence, enzymatic activity, and ligand binding. In some embodiments, the first and second components of the detectable complex are fragments of a protein capable of generating a detectable signal, and wherein the detectable complex is capable of generating the detectable signal upon association of the first and second components of the detectable complex.

[0011] In some embodiments, the detectable signal is fluorescence. In some embodiments, the first and second components of the detectable complex comprise at least 70% (e.g., 70%, 75%, 80%, 85%, 90%, 95%, 100%, or ranges therebetween) sequence identity with first and second fragments of a fluorescent protein. In some embodiments, the fluorescent protein is selected from yellow fluorescent protein (YFP), green fluorescent protein (GFP), cyan fluorescent protein (CFP), red fluorescent protein (RFP), umbelliferone, fluorescein, fluorescein isothiocyanate, rhodamine, dichlorotriazinylamine fluorescein, cyanines, dansyl chloride, phycocyanin, and phycoerythrin.

[0012] In some embodiments, the detectable signal is enzymatic activity. In some embodiments, the first and second components of the detectable complex comprise at least 70% (e.g., 70%, 75%, 80%, 85%, 90%, 95%, 100%, or ranges therebetween) sequence identity with first and second fragments of an enzyme. In some embodiments, the enzyme is selected from beta-lactamase, dihydrofolate reductase (DHFR), focal adhesion kinase (FAK), Gal4, and horseradish peroxidase. In some embodiments, the detectable signal is luminescence in the presence of a substrate. In some embodiments, the first and second components of the detectable complex comprise at least 70% (e.g., 70%, 75%, 80%, 85%, 90%, 95%, 100%, or ranges therebetween) sequence identity with first and second fragments of an luciferase. In some embodiments, the luciferase is selected from an Oplophorus luciferase, a firefly luciferase, a click beetle luciferase, a Renilla luciferase, cypridina luciferase, an Aequorin photoprotein, and an obelin photoprotein. In some embodiments, the first and second components of the detectable complex collectively comprise at least 70% (e.g., 70%, 75%, 80%, 85%, 90%, 95%, 100%, or ranges therebetween) sequence identity with SEQ ID NO: 3041. In some embodiments, the first component of the detectable complex comprises at least 70% (e.g., 70%, 75%, 80%, 85%, 90%, 95%, 100%, or ranges therebetween) sequence identity with SEQ ID NO: 3042 and the first component of the detectable complex comprises at least 70% (e.g., 70%, 75%, 80%, 85%, 90%, 95%, 100%, or ranges therebetween) sequence identity with SEQ ID NO: 3050. In some embodiments, the first component of the detectable complex comprises at least 70% (e.g., 70%, 75%, 80%, 85%, 90%, 95%, 100%, or ranges therebetween) sequence identity with SEQ ID NO: 3043 and the first component of the detectable complex comprises at least 70% (e.g., 70%, 75%, 80%, 85%, 90%, 95%, 100%, or ranges therebetween) sequence identity with SEQ ID NO: 3051. In some embodiments, the first component of the detectable complex comprises at least 70% (e.g., 70%, 75%, 80%, 85%, 90%, 95%, 100%, or ranges therebetween) sequence identity with SEQ ID NO: 3044 and the first component of the detectable complex comprises at least 70% (e.g., 70%, 75%, 80%, 85%, 90%, 95%, 100%, or ranges therebetween) sequence identity with SEQ ID NO: 3052. In some embodiments, the first component of the detectable complex comprises at least 70% (e.g., 70%, 75%, 80%, 85%, 90%, 95%, 100%, or ranges therebetween) sequence identity with SEQ ID NO: 3045 and the first component of the detectable complex comprises at least 70% (e.g., 70%, 75%, 80%, 85%, 90%, 95%, 100%, or ranges therebetween) sequence identity with SEQ ID NO: 3053. In some embodiments, systems further comprise the substrate.

[0013] In some embodiments, the detectable signal is ligand binding. In some embodiments, the detectable complex is a modified dehalogenase complex and wherein the first and second components of the modified dehalogenase complex comprise at least 70% (e.g., 70%, 75%, 80%, 85%, 90%, 95%, 100%, or ranges therebetween) sequence identity with first and second fragments of a modified dehalogenase. In some embodiments, the modified dehalogenase comprises SEQ ID NO: 1. In some embodiments, systems further comprise a haloalkyl ligand for the modified dehalogenase. In some embodiments, the haloalkyl ligand comprises R-linker-A-X, wherein R is a detectable moiety, X is a halogen, and A-X is a substrate for a dehalogenase enzyme. In some embodiments, R is a fluorophore.

[0014] In some embodiments, provided herein are double-stranded RNA (dsRNA) detection systems comprising: (a) a first fusion of (i) a PKR-derived dsRNA binding domain sequence, and (ii) a peptide component of a bioluminescent complex; and (b) a second fusion of (i) the PKR-derived dsRNA binding domain sequence, and (ii) a polypeptide component of a bioluminescent complex; wherein upon binding of the PKR-derived dsRNA binding domain sequences to a dsRNA a luminescent complex is formed by structural complementation of the peptide component and the polypeptide component; and wherein a luminescent signal produced by the luminescent complex in the presence of the dsRNA and a substrate for the luminescent complex is enhanced when compared to a luminescent signal produced in the absence of the dsRNA. In some embodiments, systems further comprise the substrate for the luminescent complex. In some embodiments, the substrate for the luminescent complex is an imidazopyrazine luminophore. In some embodiments, the imidazopyrazine luminophore is coelenterazine or furimazine. In some embodiments, systems further comprise dsRNA. In some embodiments, the dsRNA binding domain comprises dsRNA binding motifs having at least 70% (e.g., 70%, 75%, 80%, 85%, 90%, 95%, 100%, or ranges therebetween) sequence similarity with SEQ ID NO: 3062 and SEQ ID NO: 3063. In some embodiments, the dsRNA binding domain comprises dsRNA binding motifs having at least 70% (e.g., 70%, 75%, 80%, 85%, 90%, 95%, 100%, or ranges therebetween) sequence identity with SEQ ID NO: 3062 and SEQ ID NO: 3063. In some embodiments, the dsRNA binding domain comprises at least 70% (e.g., 70%, 75%, 80%, 85%, 90%, 95%, 100%, or ranges therebetween) sequence similarity with SEQ ID NO: 3061. In some embodiments, the dsRNA binding domain comprises at least 70% (e.g., 70%, 75%, 80%, 85%, 90%, 95%, 100%, or ranges therebetween) sequence identity with SEQ ID NO: 3061. In some embodiments, the dsRNA binding domain comprises SEQ ID NO: 3061. In some embodiments, the peptide component has at least 70% (e.g., 70%, 75%, 80%, 85%, 90%, 95%, 100%, or ranges therebetween) sequence similarity with SEQ ID NO: 3038 and/or the polypeptide component has at least 70% (e.g., 70%, 75%, 80%, 85%, 90%, 95%, 100%, or ranges therebetween) sequence similarity with SEQ ID NO: 3037. In some embodiments, the peptide component has at least 70% (e.g., 70%, 75%, 80%, 85%, 90%, 95%, 100%, or ranges therebetween) sequence identity with SEQ ID NO: 3038 and/or the polypeptide component has at least 70% (e.g., 70%, 75%, 80%, 85%, 90%, 95%, 100%, or ranges therebetween) sequence identity with SEQ ID NO: 3037. In some embodiments, the peptide component comprises SEQ ID NO: 3038 and the polypeptide comprises SEQ ID NO: 3037.

[0015] In some embodiments, provided herein are methods of detecting dsRNA in a sample, the method comprising contacting the sample with a system described herein and detecting a signal from the detectable complex, wherein the amount of signal detected correlates with the amount of dsRNA in the sample. In some embodiments, the sample comprises a single stranded RNA-based therapeutic. In some embodiments, the sample further comprises a dsRNA (e.g., a contaminant).

### BRIEF DESCRIPTION OF THE DRAWINGS

[0016] FIG. 1. Cartoon depicting the binding of protein kinase R (PKR) to a dsRNA and dimerization of two PKR.

[0017] FIG. 2. Cartoon depicting an exemplary embodiment of the present technology in which two components of a luminescent complex (LgBiT and SmBIT) are provided as fusions with the dsRNA binding domain of PKR; binding of the dsRNA binding domains to a dsRNA results in formation of the active luminescent complex.

[0018] FIG. 3. Graph depicting increasing luminescent signal with increasing dsRNA in the presence of an exemplary system of FIG. 2.

[0019] FIG. 4. Graph depicting increasing fluorescent signal with increasing dsRNA in the presence of an exemplary system comprising fusions of a split GFP construct with the dsRNA binding domain of PKR (PKR-LgGFP and PKR-SmGFP).

### DEFINITIONS

[0020] Although any methods and materials similar or equivalent to those described herein can be used in the practice or testing of embodiments described herein, some preferred methods, compositions, devices, and materials are described herein. However, before the present materials and methods are described, it is to be understood that this invention is not limited to the particular molecules, compositions, methodologies, or protocols herein described, as these may vary in accordance with routine experimentation and optimization. It is also to be understood that the terminology used in the description is for the purpose of describing the particular versions or embodiments only, and is not intended to limit the scope of the embodiments described herein.

[0021] Unless otherwise defined, all technical and scientific terms used herein have the same meaning as commonly understood by one of ordinary skill in the art to which this invention belongs. However, in case of conflict, the present specification, including definitions, will control. Accordingly, in the context of the embodiments described herein, the following definitions apply.

[0022] As used herein and in the appended claims, the singular forms “a,” “an,” and “the” include plural reference unless the context clearly dictates otherwise. Thus, for example, reference to “a polypeptide” is a reference to one or more polypeptides and equivalents thereof known to those skilled in the art, and so forth.

[0023] As used herein, the term “and/or” includes any and all combinations of listed items, including any of the listed items individually. For example, “A, B, and/or C” encompasses A, B, C, AB, AC, BC, and ABC, each of which is to be considered separately described by the statement “A, B, and/or C.”

[0024] As used herein, the term “comprise” and linguistic variations thereof denote the presence of recited feature(s), element(s), method step(s), etc., without the exclusion of the presence of additional feature(s), element(s), method step(s), etc. Conversely, the term “consisting of” and linguistic variations thereof, denotes the presence of recited feature(s), element(s), method step(s), etc., and excludes any unrecited feature(s), element(s), method step(s), etc., except for ordinarily-associated impurities. The phrase “consisting essentially of” denotes the recited feature(s), element(s), method step(s), etc., and any additional feature(s), element(s), method step(s), etc., that do not materially affect the basic nature of the composition, system, or method. Many embodiments herein are described using open “comprising” language. Such embodiments encompass multiple closed “consisting of” and/or “consisting essentially of” embodiments, which may alternatively be claimed or described using such language.

[0025] As used herein, the term “substantially” means that the recited characteristic, parameter, and/or value need not be achieved exactly, but that deviations or variations, including for example, tolerances, measurement error, measurement accuracy limitations and other factors known to skill in the art, may occur in amounts that do not preclude the effect the characteristic was intended to provide. A characteristic or feature that is substantially absent (e.g., substantially non-fluorescent) may be one that is within the noise, beneath background, below the detection capabilities of the assay being used, or a small fraction (e.g., <1%, <0.1%, <0.01%, <0.001%, <0.00001%, <0.000001%, <0.0000001%) of the significant characteristic (e.g., fluorescent intensity of an active fluorophore).

[0026] As used herein, when referring to amino acid sequences or positions within an amino acid sequence, the phrase “corresponding to” refers to the relative position of an amino acid residue or an amino acid segment with the sequence being referred to, not necessarily the specific identity of the amino acids at that position. For example, a “peptide corresponding to positions 36 through 48 of SEQ ID NO: 1” may comprise less than 100% sequence identity with positions 36 through 48 of SEQ ID NO: 1 (e.g., >70% sequence identity), but within the context of the composition or system being described the peptide relates to those positions.

[0027] As used herein, the term “system” refers to multiple components (e.g., devices, compositions, etc.) that find use for a particular purpose. For example, two separate biological molecules, whether present in the same composition or not, may comprise a system if they are useful together for a shared purpose.

[0028] As used herein, the term “complementary” refers to the characteristic of two or more structural elements (e.g., peptide, polypeptide, nucleic acid, small molecule, etc.) of being able to hybridize, dimerize, or otherwise form a complex with each other. For example, a “complementary peptide and polypeptide” are capable of coming together to form a complex. Complementary elements may require assistance (facilitation) to form a complex (e.g., from interaction elements), for example, to place the elements in the proper conformation for complementarity, to place the elements in the proper proximity for complementarity, to co-localize complementary elements, to lower interaction energy for complementary, to overcome insufficient affinity for one another, etc.

[0029] As used herein, the term “complex” refers to an assemblage or aggregate of molecules (e.g., peptides, polypeptides, etc.) in direct and/or indirect contact with one another. In one aspect, “contact,” or more particularly “direct contact,” means two or more molecules are close enough so that attractive noncovalent interactions, such as Van der Waal forces, hydrogen bonding, ionic and hydrophobic interactions, and the like, dominate the interaction of the molecules. In such an aspect, a complex of molecules (e.g., peptides, polypeptides, etc.) is formed under assay conditions such that the complex is thermodynamically favored (e.g., compared to a non-aggregated, or non-complexed, state of its component molecules). As used herein the term “complex,” unless described as otherwise, refers to the assemblage of two or more molecules (e.g., peptides, polypeptides, etc.). The molecules that assemble to for a complex are referred to herein as “components” or linguistic variations thereof.

[0030] As used herein, the term “low affinity” describes an intermolecular interaction between two or more entities that is too weak to result in significant complex formation between the entities, except at concentrations substantially higher (e.g., 2-fold, 5-fold, 10-fold, 100-fold, 1000-fold, or more) than physiologic or assay conditions, or with facilitation from the formation of a second complex of attached elements (e.g., interaction elements).

[0031] As used herein, the term “high affinity” describes an intermolecular interaction between two or more (e.g., three) entities that is of sufficient strength to produce detectable complex formation under physiologic or assay conditions without facilitation from the formation of a second complex of attached elements (e.g., interaction elements).

[0032] The term “amino acid” refers to natural amino acids, unnatural amino acids, and amino acid analogs, all in their D and L stereoisomers, unless otherwise indicated, if their structures allow such stereoisomeric forms.

[0033] The term “proteinogenic amino acids” refers to the 20 amino acids coded for in the human genetic code, and includes alanine (Ala or A), arginine (Arg or R), asparagine (Asn or N), aspartic acid (Asp or D), cysteine (Cys or C), glutamine (Gln or Q), glutamic acid (Glu or E), glycine (Gly or G), histidine (His or H), isoleucine (Ile or I), leucine (Leu or L), Lysine (Lys or K), methionine (Met or M), phenylalanine (Phe or F), proline (Pro or P), serine (Ser or S), threonine (Thr or T), tryptophan (Trp or W), tyrosine (Tyr or Y) and valine (Val or V). Selenocysteine and pyrrolysine may also be considered proteinogenic amino acids

[0034] The term “non-proteinogenic amino acid” refers to an amino acid that is not naturally-encoded or found in the genetic code of any organism, and is not incorporated biosynthetically into proteins during translation. Non-proteinogenic amino acids may be “unnatural amino acids” (amino acids that do not occur in nature) or “naturally-occurring non-proteinogenic amino acids” (e.g., norvaline, ornithine, homocysteine, etc.). Examples of non-proteinogenic amino acids include, but are not limited to, azetidinecarboxylic acid, 2-aminoadipic acid, 3-aminoadipic acid, beta-alanine, naphthylalanine, aminopropionic acid, 2-aminobutyric acid, 4-aminobutyric acid, 6-aminocaproic acid, 2-aminoheptanoic acid, 2-aminoisobutyric acid, 3-aminoisbutyric acid, 2-aminopimelic acid, tertiary-butylglycine, 2,4-diaminoisobutyric acid, desmosine, 2,2′-diaminopimelic acid, 2,3-diaminopropionic acid, N-ethylglycine, N-ethylasparagine, homoproline, hydroxylysine, allo-hydroxylysine, 3-hydroxyproline, 4-hydroxyproline, isodesmosine, allo-isoleucine, N-methylalanine, N-alkylglycine including N-methylglycine, N-methylisoleucine, N-alkylpentylglycine including N-methylpentylglycine, N-methylvaline, naphthylalanine, norvaline, norleucine (“Norleu”), octylglycine, ornithine, pentylglycine, pipecolic acid, thioproline, homolysine, and homoarginine. Non-proteinogenic also include D-amino acid forms of any of the amino acids herein, as well as non-alpha amino acid forms of any of the amino acids herein (beta-amino acids, gamma-amino acids, delta-amino acids, etc.), all of which are in the scope herein and may be included in peptides herein.

[0035] The term “amino acid analog” refers to an amino acid (e.g., natural or unnatural, proteinogenic or non-proteinogenic) where one or more of the C-terminal carboxy group, the N-terminal amino group and side-chain bioactive group has been chemically blocked, reversibly or irreversibly, or otherwise modified to another bioactive group. For example, aspartic acid-(beta-methyl ester) is an amino acid analog of aspartic acid; N-ethylglycine is an amino acid analog of glycine; or alanine carboxamide is an amino acid analog of alanine. Other amino acid analogs include methionine sulfoxide, methionine sulfone, S-(carboxymethyl)-cysteine, S-(carboxymethyl)-cysteine sulfoxide, and S-(carboxymethyl)-cysteine sulfone.

[0036] As used herein, unless otherwise specified, the terms “peptide” and “polypeptide” refer to polymer compounds of two or more amino acids joined through the main chain by peptide amide bonds (—C(O) NH—). The term “peptide” typically refers to short amino acid polymers (e.g., chains having fewer than 30 amino acids), whereas the term “polypeptide” typically refers to longer amino acid polymers (e.g., chains having more than 30 amino acids).

[0037] As used herein, a “conservative” amino acid substitution refers to the substitution of an amino acid in a peptide or polypeptide with another amino acid having similar chemical properties such as size or charge. For purposes of the present disclosure, each of the following eight groups contains amino acids that are conservative substitutions for one another:
[0038] 1) Alanine (A) and Glycine (G);
[0039] 2) Aspartic acid (D) and Glutamic acid (E);
[0040] 3) Asparagine (N) and Glutamine (Q);
[0041] 4) Arginine (R) and Lysine (K);
[0042] 5) Isoleucine (I), Leucine (L), Methionine (M), and Valine (V);
[0043] 6) Phenylalanine (F), Tyrosine (Y), and Tryptophan (W);
[0044] 7) Serine(S) and Threonine (T); and
[0045] 8) Cysteine (C) and Methionine (M).

[0046] Amino acid residues may be divided into classes based on common side chain properties, for example: polar positive (or basic) (e.g., histidine (H), lysine (K), and arginine (R)); polar negative (or acidic) (e.g., aspartic acid (D), glutamic acid (E)); polar neutral (e.g., serine(S), threonine (T), asparagine (N), glutamine (Q)); non-polar aliphatic (e.g., alanine (A), valine (V), leucine (L), isoleucine (I), methionine (M)); non-polar aromatic (e.g., phenylalanine (F), tyrosine (Y), tryptophan (W)); proline and glycine; and cysteine. As used herein, a “semi-conservative” amino acid substitution refers to the substitution of an amino acid in a peptide or polypeptide with another amino acid within the same class.

[0047] In some embodiments, unless otherwise specified, a conservative or semi-conservative amino acid substitution may also encompass non-naturally occurring amino acid residues that have similar chemical properties to the natural residue. These non-natural residues are typically incorporated by chemical peptide synthesis rather than by synthesis in biological systems. These include, but are not limited to, peptidomimetics and other reversed or inverted forms of amino acid moieties. Embodiments herein may, in some embodiments, be limited to natural amino acids, non-natural amino acids, and/or amino acid analogs.

[0048] Non-conservative substitutions may involve the exchange of a member of one class for a member from another class.

[0049] As used herein, the term “sequence identity” refers to the degree two polymer sequences (e.g., peptide, polypeptide, nucleic acid, etc.) have the same sequential composition of monomer subunits. The term “sequence similarity” refers to the degree with which two polymer sequences (e.g., peptide, polypeptide, nucleic acid, etc.) have similar polymer sequences. For example, similar amino acids are those that share the same biophysical characteristics and can be grouped into the families, e.g., acidic (e.g., aspartate, glutamate), basic (e.g., lysine, arginine, histidine), non-polar (e.g., alanine, valine, leucine, isoleucine, proline, phenylalanine, methionine, tryptophan) and uncharged polar (e.g., glycine, asparagine, glutamine, cysteine, serine, threonine, tyrosine). The “percent sequence identity” (or “percent sequence similarity”) is calculated by: (1) comparing two optimally aligned sequences over a window of comparison (e.g., the length of the longer sequence, the length of the shorter sequence, a specified window), (2) determining the number of positions containing identical (or similar) monomers (e.g., same amino acids occurs in both sequences, similar amino acid occurs in both sequences) to yield the number of matched positions, (3) dividing the number of matched positions by the total number of positions in the comparison window (e.g., the length of the longer sequence, the length of the shorter sequence, a specified window), and (4) multiplying the result by 100 to yield the percent sequence identity or percent sequence similarity. For example, if peptides A and B are both 20 amino acids in length and have identical amino acids at all but 1 position, then peptide A and peptide B have 95% sequence identity. If the amino acids at the non-identical position shared the same biophysical characteristics (e.g., both were acidic), then peptide A and peptide B would have 100% sequence similarity. As another example, if peptide C is 20 amino acids in length and peptide D is 15 amino acids in length, and 14 out of 15 amino acids in peptide D are identical to those of a portion of peptide C, then peptides C and D have 70% sequence identity, but peptide D has 93.3% sequence identity to an optimal comparison window of peptide C. For the purpose of calculating “percent sequence identity” (or “percent sequence similarity”) herein, any gaps in aligned sequences are treated as mismatches at that position.

[0050] Any peptide/polypeptides described herein as having a particular percent sequence identity or similarity (e.g., at least 70%) with a reference sequence ID number, may also be expressed as having a maximum number of substitutions (or terminal deletions) with respect to that reference sequence. For example, a sequence having at least Y % sequence identity (e.g., 90%) with SEQ ID NO:Z (e.g., 100 amino acids) may have up to X substitutions (e.g., 10) relative to SEQ ID NO:Z, and may therefore also be expressed as “having X (e.g., 10) or fewer substitutions relative to SEQ ID NO:Z.”

[0051] As used herein, the term “sample” is used in its broadest sense. In one sense, it is meant to include a specimen or culture obtained from any source, as well as biological and environmental samples. Biological samples may be obtained from animals (including humans) and encompass fluids, solids, tissues, and gases. Biological samples include blood products, such as plasma, serum, and the like. Sample may also refer to cell lysates or purified forms of the enzymes, peptides, and/or polypeptides described herein. Cell lysates may include cells that have been lysed with a lysing agent or lysates such as rabbit reticulocyte or wheat germ lysates. Sample may also include cell-free expression systems. Environmental samples include environmental material such as surface matter, soil, water, crystals, and industrial samples. Such examples are not however to be construed as limiting the sample types applicable to the present invention. Pharmaceutical samples include any therapeutics that are to be tested for the presence and/or concentration of dsRNA, such as RNA-based therapeutics.

[0052] As used herein, the terms “fusion,” “fusion polypeptide,” and “fusion protein” refer to a chimeric protein containing a first protein or polypeptide of interest joined to a second different peptide, polypeptide, or protein (e.g., interaction element).

[0053] As used herein, the terms “conjugated” and “conjugation” refer to the covalent attachment of two molecular entities (e.g., post-synthesis and/or during synthetic production). The attachment of a peptide or small molecule tag to a protein or small molecule, chemically (e.g., “chemically” conjugated) or enzymatically, is an example of conjugation.

[0054] As used herein, the term “modified dehalogenase” refers to a dehalogenase variant (artificial variant) that has one or more mutations that prevent the release of the substrate from the protein following removal of the halogen, resulting in a covalent bond between the substrate and the modified dehalogenase. Because the modified dehalogenase does not release the substrate, it is not capable of turnover, and is not a classical enzyme. The HALOTAG system (Promega) is a commercially available modified dehalogenase and substrate system.

[0055] As used herein, the term “bioluminescence” refers to production and emission of light by a chemical reaction catalyzed by, or enabled by, an enzyme, protein, protein complex, or other biomolecule (e.g., bioluminescent complex). In typical embodiments, a substrate for a bioluminescent entity (e.g., bioluminescent protein or bioluminescent complex) is converted into an unstable form by the bioluminescent entity; the substrate subsequently emits light.

[0056] As used herein, the term “an Oplophorus luciferase” (“an OgLuc”) refers to a luminescent polypeptide having significant sequence identity, structural conservation, and/or the functional activity of the luciferase produce by and derived from the deep-sea shrimp Oplophorus gracilirostris. In particular, an OgLuc polypeptide refers to a luminescent polypeptide having significant sequence identity, structural conservation, and/or the functional activity of the mature 19 kDa subunit of the Oplophorus luciferase protein complex (e.g., without a signal sequence) such as SEQ ID NOs: 3034 (NanoLuc), which comprises 10 β strands (β1, β2, β3, β4, β5, β6, β7, β8, β9, β10) and utilize substrates such as coelenterazine or a coelenterazine derivative or analog to produce luminescence.

[0057] As used herein, the term “B9-like peptide” refers to a peptide (or peptide tag) comprising significant sequence identity, structural conservation, and/or the functional activity of the β (beta) 9 strand of an OgLuc polypeptide. In particular, a β9-like peptide is a peptide capable of structurally complementing an OgLuc polypeptide lacking a β9 strand resulting in enhanced luminescence of the complex compared to the OgLuc polypeptide in the absence of the β9-like peptide. Other “BX-like peptides” may be similarly named (e.g., β1-like, β2-like, β3-like, β4-like, β5-like, β6-like, β7-like, β8-like, β9-like).

[0058] As used herein, the term “β10-like peptide” refers to a peptide (or peptide tag) comprising significant sequence identity, structural conservation, and/or the functional activity of the β (beta) 10 strand of an OgLuc polypeptide. In particular, a β10-like peptide is a peptide capable of structurally complementing an OgLuc polypeptide lacking a β10 strand resulting in enhanced luminescence of the complex compared to the OgLuc polypeptide in the absence of the β10-like peptide. Other “BX-like peptides” may be similarly named (e.g., β1-like, β2-like, β3-like, β4-like, β5-like, β6-like, β7-like, β8-like, β9-like).

[0059] As used herein, the term “β₁₋₈-like polypeptide” refers to a polypeptide bearing sequence and structural similarity to β (beta) strands 1-8 of an OgLuc polypeptide, but lacking β (beta) strands 9 and 10. Other “β_{Y-Z}-like polypeptides” may be similarly named (e.g., β₁₋₄-like polypeptide, β₂₋₈-like polypeptide, β5-10-like polypeptide, etc.).

[0060] As used herein, the term “NANOLUC” refers to an artificial luciferase or bioluminescent polypeptide produced commercially by the Promega Corporation.

[0061] As used herein, the term “LgBiT” refers to a polypeptide corresponding to β₁₋₉-like polypeptide that finds use in, for example, binary complementation to form a bioluminescent complex and corresponds to SEQ ID NO: 3037.

[0062] As used herein, the term “SmBIT” refers to a peptide corresponding to Bio-like peptide that finds use in, for example, binary complementation to form a bioluminescent complex, but has low affinity for LgBiT (e.g., requires facilitation for complex formation) and corresponds to SEQ ID NO: 3039.

[0063] As used herein, the term “HiBiT” refers to a peptide corresponding to Bio-like peptide that finds use in, for example, binary complementation to form a bioluminescent complex, but has high affinity for LgBiT (e.g., does not require facilitation for complex formation). An exemplary HiBiT peptide corresponds to SEQ ID NO: 3038.

[0064] As used herein, the term “LgTrip” refers to a polypeptide corresponding to β₁₋₈-like polypeptide. An exemplary LgTrip corresponds to SEQ ID NO: 3045 and finds use in, for example, tripartite complementation with β₉-like and β₁₀-like peptides to form a bioluminescent complex, or binary complementation, with a β₉₋₁₀-like peptide to form a bioluminescent complex.

[0065] As used herein, the term “SmTrip10” refers to a peptide corresponding to Bio-like peptide that finds use in, for example, tripartite complementation to form a bioluminescent complex.

[0066] As used herein, the term “SmTrip9” refers to a peptide corresponding to β9-like peptide that finds use in, for example, tripartite complementation to form a bioluminescent complex.

[0067] As used herein, the term “split” (“sp”) refers to refers to a polypeptide that has been divided into two fragments at an interior site of the original polypeptide. The fragments of a sp polypeptide may reconstitute activity of the original polypeptide if they are structurally complementary and able to form an active complex.

### DETAILED DESCRIPTION

[0068] Provided herein are compositions comprising a double-stranded RNA (dsRNA) binding domains linked to components of a complementation system. Upon binding of a pair of dsRNA binding domains to a dsRNA, a detectable complex of the complementation components is formed, and the dsRNA can be detected/quantified.

[0069] Protein kinase R (PKR, Uniprot #P19525) is an intracellular dsRNA sensor that contains dsRNA binding domains (FIG. 1, blue and red). Upon dimerization of PKR on dsRNA, the kinase domains (FIG. 1, green) are activated, initiating downstream signaling pathways that activate inflammatory pathways and shut down protein translation. PKR binds dsRNA in manner that is independent of target sequence and requires only that the dsRNA be at least 30 base pairs in length (no upper limit). PKR binds the phosphate backbone of dsRNA and does not interact with the nucleotide bases (see, e.g., Nanduri et al., EMBO J, 1998; incorporated by reference in its entirety).

[0070] Provided herein are polypeptide constructs that take advantage of the dsRNA binding functionality of PKR and use it to facilitate formation of a detectable complex in the presence of dsRNA. In some embodiments, a pair of components of a detectable complex are fused to PKR dsRNA binding domains (or variants thereof). Upon binding of the dsRNA binding domains to a dsRNA (but not in the absence of a dsRNA), the detectable complex components interact to form the detectable complex and an associated signal is generated. The presence and/or amount of dsRNA in a sample (e.g., environmental, biological, pharmaceutical, etc.) can be detected/quantified based on the signal generated by the systems herein.

[0071] Experiments were conducted during development of embodiments herein to test exemplary systems within the scope herein. First, the commercially available LgBIT and SmBIT components of the NanoBiT system (Promega Corp, Madison, WI) were fused to dsRNA binding domain of PKR (See, e.g., FIG. 2), and luminescence was detected in the presence of furimazine substrate and increasing concentration of a dsRNA (FIG. 3). Second, a split GFP (LgGFP and SmGFP) were fused to dsRNA binding domain of PKR and fluorescence was detected in the presence of increasing concentration of a dsRNA (FIG. 4). These experiments demonstrate that the dsRNA binding domain of PKR can be used to facilitate structural complementation between complementary peptide(s)/polypeptide(s) and form detectable complexes and signal in a dsRNA concentration dependent manner. Provided herein are systems linking any suitable components of detectable complexes to dsRNA binding domains and the use of such systems for the detection of dsRNA in a sample.

I. PKR dsRNA Binding Domains

[0072] Interferon (IFN)-induced double-stranded RNA (dsRNA)-activated protein kinase R (PKR) is an IFN-stimulated gene (Gale, M. Jr., and Katze, M. G. (1998). Pharmacol. Ther. 78, 29-46; Peters, G. A., Hartmann, R., Qin, J., and Sen, G. C. (2001). Mol. Cell. Biol. 21, 1908-1920; Pindel, A., and Sadler, A. (2011). J. Interferon Cytokine Res. 31, 59-70; incorporated by reference in their entireties) and acts as a pathogen recognition receptor (Gilfoy, F. D., and Mason, P. W. (2007). J. Virol. 81, 11148-11158; incorporated by reference in its entirety) by recognizing dsRNA, a typical by-product of viral infection, for IFN induction. PKR consists of two functionally distinct domains: an N-terminal regulatory domain and a C-terminal catalytic kinase domain. The regulatory domain contains two dsRNA-binding motifs; binding of dsRNA induces PKR dimerization and allows the exposure of the catalytic site, autophosphorylation, and activation of the kinase (Wu, S., and Kaufman, R. J. (1997). J. Biol. Chem. 272, 1291-1296; Nanduri, et al. (2000). EMBO J. 19, 5567-5574; Dar et al. (2005). Cell 122, 887-900 Dey et al. (2005). Cell 122, 901-913; incorporated by reference in their entireties). Activated PKR catalyzes the phosphorylation of the regulatory α-subunit of the eukaryotic translation initiation factor 2 (cIF2α; Meurs, et al. (1992). J. Virol. 66, 5805-5814; Clemens, M. J., and Elia, A. (1997). J. Interferon Cytokine Res. 17, 503-524; incorporated by reference in their entireties), consequently blocking the initiation of mRNA translation, which results in the global arrest of both cellular and viral protein synthesis and can lead to apoptosis in response to virus infection (Balachandran, et al. (1998). EMBO J. 17, 6888-6902; incorporated by reference in its entirety).

[0073] In some embodiments, compositions are provided herein comprising a fusion of a dsRNA binding domain and a component of a detectable complex. In some embodiments, the dsRNA binding domain is capable of binding dsRNA in a sequence agnostic manner. In some embodiments, the dsRNA binding domain does not bind preferentially to the ends of dsRNA or to specific RNA structures. In some embodiments, the dsRNA binding domain binds to dsRNA, but not to single stranded RNA (ssRNA) or DNA (double or single stranded). In some embodiments, the dsRNA binding domain binds to ssRNA and/or DNA at a low enough level that any signal produced from such binding is within the background of an assay herein.

[0074] In some embodiments, the dsRNA binding domain of a fusion or system herein corresponds to a PKR dsRNA binding domain. In some embodiments, a dsRNA binding domain of a fusion herein comprises at least 70% (e.g., 70%, 75%, 80%, 85%, 90%, 95%, 100%, or ranges therebetween) sequence identity to SEQ ID NO: 3061 (PKR dsRNA binding domain). In some embodiments, a dsRNA binding domain of a fusion herein comprises at least 70% (e.g., 70%, 75%, 80%, 85%, 90%, 95%, 100%, or ranges therebetween) sequence similarity to SEQ ID NO: 3061 (PKR dsRNA binding domain).

[0075] In some embodiments, the dsRNA binding domain of a fusion or system herein comprises a portion or portions that correspond to a portion of the PKR dsRNA binding domain. In some embodiments, the dsRNA binding domain of a fusion or system herein comprises a portion that correspond to the first dsRNA binding motif of the PKR dsRNA binding domain (SEQ ID NO: 3062). In some embodiments, all or a portion of a dsRNA binding domain of a fusion herein comprises at least 70% (e.g., 70%, 75%, 80%, 85%, 90%, 95%, 100%, or ranges therebetween) sequence identity to SEQ ID NO: 3062 (PKR dsRNA binding motif 1). In some embodiments, all or a portion of a dsRNA binding domain of a fusion herein comprises at least 70% (e.g., 70%, 75%, 80%, 85%, 90%, 95%, 100%, or ranges therebetween) sequence similarity to SEQ ID NO: 3062 (PKR dsRNA binding motif 1). In some embodiments, the dsRNA binding domain of a fusion or system herein comprises a portion that correspond to the second dsRNA binding motif of the PKR dsRNA binding domain (SEQ ID NO: 3063). In some embodiments, all or a portion of a dsRNA binding domain of a fusion herein comprises at least 70% (e.g., 70%, 75%, 80%, 85%, 90%, 95%, 100%, or ranges therebetween) sequence identity to SEQ ID NO: 3063 (PKR dsRNA binding motif 2). In some embodiments, all or a portion of a dsRNA binding domain of a fusion herein comprises at least 70% (e.g., 70%, 75%, 80%, 85%, 90%, 95%, 100%, or ranges therebetween) sequence similarity to SEQ ID NO: 3063 (PKR dsRNA binding motif 2). In some embodiments, a dsRNA binding domain of a fusion herein comprises a first segment with at least 70% (e.g., 70%, 75%, 80%, 85%, 90%, 95%, 100%, or ranges therebetween) sequence identity to SEQ ID NO: 3062 (PKR dsRNA binding motif 1) and a second segment with at least 70% (e.g., 70%, 75%, 80%, 85%, 90%, 95%, 100%, or ranges therebetween) sequence identity to SEQ ID NO: 3063 (PKR dsRNA binding motif 2). In some embodiments, a dsRNA binding domain of a fusion herein comprises a first segment with at least 70% (e.g., 70%, 75%, 80%, 85%, 90%, 95%, 100%, or ranges therebetween) sequence similarity to SEQ ID NO: 3062 (PKR dsRNA binding motif 1) and a second segment with at least 70% (e.g., 70%, 75%, 80%, 85%, 90%, 95%, 100%, or ranges therebetween) sequence similarity to SEQ ID NO: 3063 (PKR dsRNA binding motif 2). In some embodiments, segments corresponding to PKR dsRNA binding motif 1 and PKR dsRNA binding motif 2 (or variants thereof) are fused by a linker of 1-100 amino acids in length. In some embodiments, the linker comprises the natural linker present in the PKR dsRNA binding domain.

### II. Detectable Complexes

[0076] In some embodiments, the systems herein comprise a pair of fusions: (1) a first fusion comprising a dsRNA binding domain linked to a first component of a detectable complex, and (2) a second fusion comprising a dsRNA binding domain linked to a second component of a detectable complex. In some embodiments, the components of the complex have a sufficiently low enough affinity for one another that a facilitation is required in order to form a complex and produce a detectable signal (or the signal produced upon facilitation is significantly greater than the unfacilitated signal such that the unfacilitated signal resides in the background). In some embodiments, the binding of the dsRNA binding domains linked to the components of the detectable complex provides facilitation to form the detectable complex and produce the detectable signal.

[0077] In some embodiments, the complex may produce any suitable signal that allows for detection of binding of a pair of complementary fusions herein to dsRNA. For example, upon complementation, a detectable complex may produce any suitable signal, such as fluorescence, luminescence, enzymatic activity, ligand binding, etc. In some embodiments, the components correspond to fragments of an enzyme or other protein capable of producing a detectable signal (or variants of such fragments). In such embodiments, upon facilitation by binding of the dsRNA binding domains to a dsRNA, the components form a complex that is analogous to the enzyme or other protein, and a corresponding signal can be detected. In other embodiments, the components may form a detectable complex that does not correspond to an existing enzyme or complex.

[0078] In some embodiments, the detectable complex corresponds to a protein that has been split into two fragments that are capable of non-covalently interacting to form a complex that exhibits the functional activity of the protein (See, e.g., Shekhawat & Ghosh. Curr Opin Chem Biol. 2011 December; 15 (6): 789-797; incorporated by reference in its entirety). In some embodiments, a suitable protein is one with a detectable activity that that is reversibly eliminated by fragmenting the protein into two separate components, wherein the activity is reconstituted when the fragments are non-covalently reassociated through the binding of dsRNA binding domains fused to the respective fragments to a dsRNA. Any protein that can be split into fragments that can associate (e.g., with facilitation) to reconstitute the activity of the parent protein could find use in embodiments herein. Examples of such proteins include beta-lactamase (Galarneau et al. Nat. Biotech. 2002; 20 (6): 619-622; incorporated by reference in its entirety), ubiquitin (Johnsson & Varshavsky A. Proc Natl Acad Sci USA. 1994; 91:10340-13044; incorporated by reference in its entirety), dihydrofolate reductase (DHFR) (Pelletier et al. Proc Natl Acad Sci USA. 1998; 95:12141-12146; incorporated by reference in its entirety), focal adhesion kinase (FAK), Gal4, GFP and variants (Ghosh et al. J. Am. Chem. Soc. 2000; 122:5658-5659; Hu & Kerppola. Nat. Biotechnol. 2003; 21:539-1545; incorporated by reference in their entireties) (e.g., EGFP), horseradish peroxidase, infrared fluorescent protein, various luciferases (Remy & Michnick. Nat. Meth. 2006; 3 (12): 977-979; Paulmurugan & Gambhir. Ana. Chem. 2003; 759 (7): 1584-1589; incorporated by reference in their entireties) (e.g., recombinase enhanced bimolecular luciferase, Gaussia princeps luciferase, Firefly (Luker et al. Proc Natl Acad Sci USA. 2004; 101:12288-122893; incorporated by reference in its entirety), etc.), tobacco etch virus (TEV) protease (Wehr et al. Nat. Meth. 2006; 3 (12): 985-993; incorporated by reference in its entirety), thymidine kinase (Massoud et al. Nat. Med. 2010; 16 (8): 921-927; incorporated by reference in its entirety), chorismate mutase (Muller et al. Prot. Sci. 2010; 19 (5): 1000-1010; incorporated by reference in its entirety), etc. In some embodiments, the components of a complex used in embodiments herein are variants of the fragments of a protein (e.g., less than 100% sequence identity) but are capable of producing activity similar to that of the protein upon complex formation. Other examples of detectable complex components are described below.

### A. HaloTag

[0079] In some embodiments, provided herein are fusions of dsRNA bounding domains with complementary pairs of peptides/polypeptides capable of interacting with each other (e.g., facilitated by binding of dsRNA binding domains to a dsRNA) to form an active modified dehalogenase complex capable of forming a covalent bond to a haloalkane ligand. In some embodiments, a first fusion is provided comprising a first complementary peptide or polypeptide fragment of a modified dehalogenase, and a second fusion is provided comprising a second complementary peptide or polypeptide fragment of the modified dehalogenase, wherein upon interacting (e.g., facilitated by binding of the dsRNA bounding domains to a dsRNA), the complementary peptide(s)/polypeptide(s) form an active modified dehalogenase complex capable of forming a covalent bond to a haloalkane ligand. In some embodiments, the complementary peptide(s)/polypeptide(s) are fragments of a split mutant dehalogenase.

[0080] In some embodiments, the peptide/polypeptide components capable of forming a modified dehalogenase complex are fragments of a split mutated dehalogenase, such as those derived from the commercially available HALOTAG protein (Promega) and/or mutated dehalogenases disclosed in U.S. published application 2006/0024808, the disclosure of which is incorporated by reference herein.

[0081] In some embodiments, provided as a component of the compositions, systems, and methods herein are split modified dehalogenases. In some embodiments, a first fragment of a mutant dehalogenase is fused to a first dsRNA binding domain, and a second fragment of the mutant dehalogenase is fused to a second dsRNA binding domain. In some embodiments, at least one of the mutant dehalogenase fragments has a substitution that if present in a full-length modified dehalogenase (or a corresponding complex), forms a covalent bond with a haloalkane ligand. In some embodiments, the first fragment of the mutant dehalogenase and the second fragment of the mutant dehalogenase are capable of interacting (e.g., facilitated by binding of linked dsRNA binding domains to a dsRNA) to form an active modified dehalogenase complex.

[0082] HALOTAG is a 297-residue self-labeling polypeptide (33 kDa) derived from a bacterial hydrolase (dehalogenase) enzyme, which has been modified to covalently bind to its ligand, a haloalkane moiety. The HALOTAG ligand can be linked to solid surfaces (e.g., beads) or functional groups (e.g., fluorophores), and the HALOTAG polypeptide can be fused to various proteins of interest, allowing covalent attachment of the protein of interest to the solid surface or functional group. The HALOTAG polypeptide is a modified dehalogenase with a genetically modified active site, which specifically binds to the haloalkane ligand chloroalkane linker with an enhanced and increased rate of ligand binding (Pries et al. The Journal of Biological Chemistry. 270 (18): 10405-11; incorporated by reference in its entirety). The reaction that forms the bond between the protein tag and chloroalkane linker is fast and essentially irreversible under physiological conditions (Waugh DS (June 2005). Trends in Biotechnology. 23 (6): 316-20; incorporated by reference in its entirety). In the natural hydrolase enzyme, nucleophilic attack of the chloroalkane reactive linker causes displacement of the halogen with an amino acid residue, which results in the formation of a covalent alkyl-enzyme intermediate. This intermediate would then be hydrolyzed by an amino acid residue within the wild-type hydrolase (Chen et al. (February 2005) Current Opinion in Biotechnology. 16 (1): 35-40; incorporated by reference in its entirety). This would lead to regeneration of the enzyme following the reaction. However, with HALOTAG, the modified haloalkane dehalogenase, the reaction intermediate cannot proceed through the second reaction because it cannot be hydrolyzed due to the mutation in the enzyme. This causes the intermediate to persist as a stable covalent adduct with which there is no associated back reaction (Marks et al. (August 2006) Nature Methods. 3 (8): 591-6; incorporated by reference in its entirety). Various HALOTAG ligands, functional groups, fusions, assays, modifications, uses, etc. are described in U.S. Pat. Nos. 8,748,148; 9,593,316; 10,246,690; 8,742,086; 9,873,866; 10,604,745; U.S. Pat. App. 2009/0253131; U.S. Pat. App. 2010/0273186; 20130337539; U.S. Pat. App. 2012/0258470; U.S. Pat. App. 2012/0252048; U.S. Pat. App. 2011/0201024; U.S. 2014/0322794; each of which is incorporated by reference in their entireties.

[0083] In some embodiments, the fragments, complementary peptides, complementary polypeptides, etc., of a modified dehalogenase described herein are a HALOTAG-based complementation system. In some embodiments, the fragments, complementary peptides, complementary polypeptides, etc., of a modified dehalogenase described herein correspond (e.g., sequence identity, sequence similarity, 3D structure, etc.) to sequences within the HALOTAG protein. In some embodiments, a modified dehalogenase complex herein, comprising two or more peptide or polypeptide components corresponds to a HALOTAG protein and is capable of binding to a halkoalkyl ligand in a similar manner.

[0084] In some embodiments, as described in U.S. Prov. App. No. 63/338,323 and PCT App. No. PCT/US23/20959, both of which are herein incorporated by reference in their entireties, extensive experiments have been conducted to demonstrate the feasibility of generating fragments of HALOTAG (and variants thereof) capable of interacting to form a modified dehalogenase complex capable of binding to a haloalkyl ligand, as well as optimizing variants of HALOTAG fragments for desired characteristics. As described herein, embodiments are not limited to the HALOTAG sequences. In some embodiments, provided herein are split modified dehalogenases (e.g., as fusions with dsRNA binding domains) that differ in sequence from HALOTAG (SEQ ID NO: 1).

[0085] In some embodiments, compositions and systems are provided comprising components of a split modified dehalogenase, such as a split HALOTAG (“spHT”) or variants thereof (e.g., as fusions with dsRNA binding domains). In some embodiments, systems and compositions herein comprise spHT peptides and polypeptides (e.g., as a portion of the fusions described herein).

[0086] In some embodiments, compositions (e.g., fusions) and systems (e.g., multiple fusions with appropriate ligands and substrates) are provided comprising polypeptides, peptides, fragments, and combinations thereof derived from a modified dehalogenase sequence of SEQ ID NO: 1 (HALOTAG):

MAEIGTGFPFDPHYVEVLGERMHYVDVGPRDGTPVLFLHGNPTSSYVWRN
IIPHVAPTHRCIAPDLIGMGKSDKPDLGYFFDDHVRFMDAFIEALGLEEV
VLVIHDWGSALGFHWAKRNPERVKGIAFMEFIRPIPTWDEWPEFARETFQ
AFRTTDVGRKLIIDQNVFIEGTLPMGVVRPLTEVEMDHYREPFLNPVDRE
PLWRFPNELPIAGEPANIVALVEEYMDWLHQSPVPKLLFWGTPGVLIPPA
EAARLAKSLPNCKAVDIGPGLNLLQEDNPDLIGSEIARWLSTLEISG.

[0087] In some embodiments, spHT peptides and polypeptides herein (e.g., as portions of fusions with dsRNA binding domains) comprise at least 70% sequence identity with a portion of SEQ ID NO: 1 (e.g., >70% sequence identity, >75% sequence identity, >80% sequence identity, >85% sequence identity, >90% sequence identity, >95% sequence identity, >96% sequence identity, >97% sequence identity, >98% sequence identity, >99% sequence identity). In some embodiments, spHT peptides and polypeptides (e.g., as portions of fusions with dsRNA binding domains) comprise 100% sequence identity with all or a portion of SEQ ID NO: 1. In some embodiments, spHT peptides and polypeptides herein (e.g., as portions of fusions with dsRNA binding domains) comprise at least 70% sequence similarity with all or a portion of SEQ ID NO: 1 (e.g., >70% sequence similarity, >75% sequence similarity, >80% sequence similarity, >85% sequence similarity, >90% sequence similarity, >95% sequence similarity, >96% sequence similarity, >97% sequence similarity, >98% sequence similarity, >99% sequence similarity). In some embodiments, spHT peptides and polypeptides herein (e.g., as portions of fusions with dsRNA binding domains) comprise 100% sequence similarity with all or a portion of SEQ ID NO: 1.

[0088] In some embodiments, spHT peptides or polypeptides (e.g., as portions of fusions with dsRNA binding domains) herein comprise an A at a position corresponding to position 2 of SEQ ID NO: 1. In other embodiments, spHT peptides or polypeptides (e.g., as portions of fusions with dsRNA binding domains) herein comprise an S at a position corresponding to position 2 of SEQ ID NO: 1. In some embodiments, spHT peptides or polypeptides (e.g., as portions of fusions with dsRNA binding domains) herein comprise a V at a position corresponding to position 47 of SEQ ID NO: 1. In some embodiments, spHT peptides or polypeptides (e.g., as portions of fusions with dsRNA binding domains) herein comprise a T at a position corresponding to position 58 of SEQ ID NO: 1. In some embodiments, spHT peptides or polypeptides (e.g., as portions of fusions with dsRNA binding domains) herein comprise a G at a position corresponding to position 78 of SEQ ID NO: 1. In some embodiments, spHT peptides or polypeptides (e.g., as portions of fusions with dsRNA binding domains) herein comprise a F at a position corresponding to position 88 of SEQ ID NO: 1. In some embodiments, spHT peptides or polypeptides (e.g., as portions of fusions with dsRNA binding domains) herein comprise a M at a position corresponding to position 89 of SEQ ID NO: 1. In some embodiments, spHT peptides or polypeptides (e.g., as portions of fusions with dsRNA binding domains) herein comprise a F at a position corresponding to position 128 of SEQ ID NO: 1. In some embodiments, spHT peptides or polypeptides (e.g., as portions of fusions with dsRNA binding domains) herein comprise a T at a position corresponding to position 155 of SEQ ID NO: 1. In some embodiments, spHT peptides or polypeptides (e.g., as portions of fusions with dsRNA binding domains) herein comprise a K at a position corresponding to position 160 of SEQ ID NO: 1. In some embodiments, spHT peptides or polypeptides (e.g., as portions of fusions with dsRNA binding domains) herein comprise a V at a position corresponding to position 167 of SEQ ID NO: 1. In some embodiments, spHT peptides or polypeptides (e.g., as portions of fusions with dsRNA binding domains) herein comprise a T at a position corresponding to position 172 of SEQ ID NO: 1. In some embodiments, spHT peptides or polypeptides (e.g., as portions of fusions with dsRNA binding domains) herein comprise a M at a position corresponding to position 175 of SEQ ID NO: 1. In some embodiments, spHT peptides or polypeptides (e.g., as portions of fusions with dsRNA binding domains) herein comprise a G at a position corresponding to position 176 of SEQ ID NO: 1. In some embodiments, spHT peptides or polypeptides (e.g., as portions of fusions with dsRNA binding domains) herein comprise a N at a position corresponding to position 195 of SEQ ID NO: 1. In some embodiments, spHT peptides or polypeptides (e.g., as portions of fusions with dsRNA binding domains) herein comprise a E at a position corresponding to position 224 of SEQ ID NO: 1. In some embodiments, spHT peptides or polypeptides (e.g., as portions of fusions with dsRNA binding domains) herein comprise a D at a position corresponding to position 227 of SEQ ID NO: 1. In some embodiments, spHT peptides or polypeptides (e.g., as portions of fusions with dsRNA binding domains) herein comprise a K at a position corresponding to position 257 of SEQ ID NO: 1. In some embodiments, spHT peptides or polypeptides (e.g., as portions of fusions with dsRNA binding domains) herein comprise an A at a position corresponding to position 264 of SEQ ID NO: 1. In some embodiments, peptides or polypeptides herein comprise a N at a position corresponding to position 272 of SEQ ID NO: 1. In some embodiments, spHT peptides or polypeptides (e.g., as portions of fusions with dsRNA binding domains) herein comprise a L at a position corresponding to position 273 of SEQ ID NO: 1. In some embodiments, spHT peptides or polypeptides (e.g., as portions of fusions with dsRNA binding domains) herein comprise a S at a position corresponding to position 291 of SEQ ID NO: 1. In some embodiments, spHT peptides or polypeptides (e.g., as portions of fusions with dsRNA binding domains) herein comprise a T at a position corresponding to position 292 of SEQ ID NO: 1. In some embodiments, spHT peptides or polypeptides (e.g., as portions of fusions with dsRNA binding domains) herein comprise a E at a position corresponding to position 294 of SEQ ID NO: 1. In some embodiments, spHT peptides or polypeptides (e.g., as portions of fusions with dsRNA binding domains) herein comprise a I at a position corresponding to position 295 of SEQ ID NO: 1. In some embodiments, spHT peptides or polypeptides (e.g., as portions of fusions with dsRNA binding domains) herein comprise a S at a position corresponding to position 296 of SEQ ID NO: 1. In some embodiments, spHT peptides or polypeptides (e.g., as portions of fusions with dsRNA binding domains) herein comprise a G at a position corresponding to position 297 of SEQ ID NO: 1.

[0089] In some embodiments, spHT peptides or polypeptides (e.g., as portions of fusions with dsRNA binding domains) herein do not have an S at a position corresponding to position 2 of SEQ ID NO: 1. In some embodiments, spHT peptides or polypeptides (e.g., as portions of fusions with dsRNA binding domains) herein do not have a L at a position corresponding to position 47 of SEQ ID NO: 1. In some embodiments, spHT peptides or polypeptides (e.g., as portions of fusions with dsRNA binding domains) herein do not have a S at a position corresponding to position 58 of SEQ ID NO: 1. In some embodiments, spHT peptides or polypeptides (e.g., as portions of fusions with dsRNA binding domains) herein do not have a D at a position corresponding to position 78 of SEQ ID NO: 1. In some embodiments, spHT peptides or polypeptides (e.g., as portions of fusions with dsRNA binding domains) herein do not have a Y at a position corresponding to position 88 of SEQ ID NO: 1. In some embodiments, spHT peptides or polypeptides (e.g., as portions of fusions with dsRNA binding domains) herein do not have a L at a position corresponding to position 89 of SEQ ID NO: 1. In some embodiments, spHT peptides or polypeptides (e.g., as portions of fusions with dsRNA binding domains) herein do not have a C at a position corresponding to position 128 of SEQ ID NO: 1. In some embodiments, spHT peptides or polypeptides (e.g., as portions of fusions with dsRNA binding domains) herein do not have an A at a position corresponding to position 155 of SEQ ID NO: 1. In some embodiments, spHT peptides or polypeptides (e.g., as portions of fusions with dsRNA binding domains) herein do not have a E at a position corresponding to position 160 of SEQ ID NO: 1. In some embodiments, spHT peptides or polypeptides (e.g., as portions of fusions with dsRNA binding domains) herein do not have an A at a position corresponding to position 167 of SEQ ID NO: 1. In some embodiments, spHT peptides or polypeptides (e.g., as portions of fusions with dsRNA binding domains) herein do not have an A at a position corresponding to position 172 of SEQ ID NO: 1. In some embodiments, spHT peptides or polypeptides (e.g., as portions of fusions with dsRNA binding domains) herein do not have a K at a position corresponding to position 175 of SEQ ID NO: 1. In some embodiments, spHT peptides or polypeptides (e.g., as portions of fusions with dsRNA binding domains) herein do not have a C at a position corresponding to position 176 of SEQ ID NO: 1. In some embodiments, spHT peptides or polypeptides (e.g., as portions of fusions with dsRNA binding domains) herein do not have a K at a position corresponding to position 195 of SEQ ID NO: 1. In some embodiments, spHT peptides or polypeptides (e.g., as portions of fusions with dsRNA binding domains) herein do not have an A at a position corresponding to position 224 of SEQ ID NO: 1. In some embodiments, spHT peptides or polypeptides (e.g., as portions of fusions with dsRNA binding domains) herein do not have a N at a position corresponding to position 227 of SEQ ID NO: 1. In some embodiments, spHT peptides or polypeptides (e.g., as portions of fusions with dsRNA binding domains) herein do not have a E at a position corresponding to position 257 of SEQ ID NO: 1. In some embodiments, spHT peptides or polypeptides (e.g., as portions of fusions with dsRNA binding domains) herein do not have a T at a position corresponding to position 264 of SEQ ID NO: 1. In some embodiments, spHT peptides or polypeptides (e.g., as portions of fusions with dsRNA binding domains) herein do not have a H at a position corresponding to position 272 of SEQ ID NO: 1. In some embodiments, spHT peptides or polypeptides (e.g., as portions of fusions with dsRNA binding domains) herein do not have a Y at a position corresponding to position 273 of SEQ ID NO: 1. In some embodiments, spHT peptides or polypeptides (e.g., as portions of fusions with dsRNA binding domains) herein do not have a P at a position corresponding to position 291 of SEQ ID NO: 1. In some embodiments, spHT peptides or polypeptides (e.g., as portions of fusions with dsRNA binding domains) herein do not have an A at a position corresponding to position 292 of SEQ ID NO: 1. In some embodiments, spHT peptides or polypeptides (e.g., as portions of fusions with dsRNA binding domains) herein do not have an amino acid at a position corresponding to position 294 of SEQ ID NO: 1. In some embodiments, spHT peptides or polypeptides (e.g., as portions of fusions with dsRNA binding domains) herein do not have an amino acid at a position corresponding to position 295 of SEQ ID NO: 1. In some embodiments, spHT peptides or polypeptides (e.g., as portions of fusions with dsRNA binding domains) herein do not have an amino acid at a position corresponding to position 296 of SEQ ID NO: 1. In some embodiments, spHT peptides or polypeptides (e.g., as portions of fusions with dsRNA binding domains) herein do not have an amino acid at a position corresponding to position 297 of SEQ ID NO: 1.

[0090] In some embodiments, a sp dehalogenase comprises two peptide and/or polypeptide components that collectively comprise at least 70% sequence similarity or identity with all or a portion of SEQ ID NO: 1 (e.g., >70% sequence similarity or identity, >75% sequence similarity or identity, >80% sequence similarity or identity, >85% sequence similarity or identity, >90% sequence similarity or identity, >95% sequence similarity or identity, >96% sequence similarity or identity, >97% sequence similarity or identity, >98% sequence similarity or identity, >99% sequence similarity or identity). For example, the first peptide/polypeptide component of the sp polypeptide corresponds to a first portion of SEQ ID NO: 1 (e.g., at least 70% sequence similarity or identity to the first portion), and the second peptide/polypeptide component of the sp polypeptide corresponds to a second portion of SEQ ID NO: 1 (e.g., at least 70% sequence similarity or identity to the second portion). In some embodiments, a sp dehalogenase (e.g., spHT) comprises two fragments that collectively comprise 100% sequence similarity or identity with all or a portion of SEQ ID NO: 1. For example, the first fragment of the sp polypeptide has 100% sequence similarity or identity to a first portion of SEQ ID NO: 1, and the second fragment of the sp polypeptide has 100% sequence similarity or identity to a second portion SEQ ID NO: 1.

[0091] In some embodiments, a sp dehalogenase (e.g., as portions of fusions with dsRNA binding domains) comprises a sp site. The sp site is an internal location in the parent sequence that defines the C-terminus of the first component or fragment and the N-terminus of the second component or fragment of the sp dehalogenase. For example, if a theoretical a 100 amino acid polypeptide were split with a sp site between residues 57 and 58 of the parent polypeptide (referred to herein as a sp site of 57), the first component polypeptide would correspond to positions 1-57, and the second component polypeptide would correspond to positions 58-100. In some embodiments herein, a sp site within SEQ ID NO: 1 may occur at any position from position 5 of SEQ ID NO: 1 to position 290 of SEQ ID NO: 1. In some embodiments, SEQ ID NOS: 2-577 are exemplary components of spHT polypeptides having 100% sequence identity to SEQ ID NO: 1. In some embodiments, an active spHT complex is formed between two fragments that collectively comprise amino acids corresponding to each position in SEQ ID NO: 1. For example, a polypeptide having a sequence of SEQ ID NO: 26 and a peptide having a sequence of SEQ ID NO: 27 collectively comprise amino acids corresponding to each position in SEQ ID NO: 1. Any pairs of peptide and polypeptides (or two polypeptides) corresponding to two of SEQ ID NOS: 2-577 and together comprising amino acids corresponding to each position in SEQ ID NO: 1 (with or without deletion or duplication of positions) find use in embodiments herein. In some embodiments, a spHT dehalogenase comprises any of the following pairs of fragments (e.g., fused to dsRNA binding domains): SEQ ID NOS: 2 and 3, 4 and 5, 6 and 7, 8 and 9, 10 and 11, 12 and 13, 14 and 15, 16 and 17, 18 and 19, 20 and 21, 22 and 23, 24 and 25, 26 and 27, 28 and 29, 30 and 31, 32 and 33, 34 and 35, 36 and 37, 38 and 39, 40 and 41, 42 and 43, 44 and 45, 46 and 47, 48 and 49, 50 and 51, 52 and 53, 54 and 55, 56 and 57, 58 and 59, 60 and 61, 62 and 63, 64 and 65, 66 and 67, 68 and 69, 70 and 71, 72 and 73, 74 and 75, 76 and 77, 78 and 79, 80 and 81, 82 and 83, 84 and 85, 86 and 87, 88 and 89, 90 and 91, 92 and 93, 94 and 95, 96 and 97, 98 and 99, 100 and 101, 102 and 103, 104 and 105, 106 and 107, 108 and 109, 110 and 111, 112 and 113, 114 and 115, 116 and 117, 118 and 119, 120 and 121, 121, 122 and 123, 124 and 125, 126 and 127, 128 and 129, 130 and 131, 132 and 133, 134 and 135, 136 and 137, 138 and 139, 140 and 141, 142 and 143, 144 and 145, 146 and 147, 148 and 149, 150 and 151, 152 and 153, 154 and 155, 156 and 157, 158 and 159, 160 and 161, 172 and 173, 174 and 175, 176 and 177, 178 and 179, 180 and 181, 182 and 183, 184 and 185, 186 and 187, 188 and 189, 190 and 191, 192 and 193, 194 and 195, 196 and 197, 198 and 199, 200 and 201, 202 and 203, 204 and 205, 206 and 207, 208 and 209, 190 and 211, 212 and 213, 214 and 215, 216 and 217, 218 and 219, 220 and 221, 222 and 223, 224 and 225, 226 and 227, 228 and 229, 300 and 301, 302 and 303, 304 and 305, 306 and 307, 308 and 309, 310 and 311, 312 and 313, 314 and 315, 316 and 317, 318 and 319, 320 and 321, 322 and 323, 324 and 325, 326 and 327, 328 and 329, 330 and 331, 332 and 333, 334 and 335, 336 and 337, 338 and 339, 340 and 341, 342 and 343, 344 and 345, 346 and 347, 348 and 349, 350 and 351, 352 and 353, 354 and 355, 356 and 357, 358 and 359, 360 and 361, 362 and 363, 364 and 365, 366 and 367, 368 and 369, 370 and 371, 372 and 373, 374 and 375, 376 and 377, 378 and 379, 380 and 381, 382 and 383, 384 and 385, 386 and 387, 388 and 389, 390 and 391, 392 and 393, 394 and 395, 396 and 397, 398 and 399, 400 and 401, 402 and 403, 404 and 405, 406 and 407, 408 and 409, 410 and 411, 412 and 413, 414 and 415, 416 and 417, 418 and 419, 420 and 421, 422 and 423, 424 and 425, 426 and 427, 428 and 429, 430 and 431, 432 and 433, 434 and 435, 436 and 437, 438 and 439, 440 and 441, 442 and 443, 444 and 445, 446 and 447, 448 and 449, 450 and 451, 452 and 453, 454 and 455, 456 and 457, 458 and 459, 460 and 461, 462 and 463, 464 and 465, 466 and 467, 468 and 469, 470 and 471, 472 and 473, 474 and 475, 476 and 477, 478 and 479, 480 and 481, 482 and 483, 484 and 485, 486 and 487, 488 and 489, 490 and 491, 492 and 493, 494 and 495, 496 and 497, 498 and 499, 500 and 501, 502 and 503, 504 and 505, 506 and 507, 508 and 509, 510 and 511, 512 and 513, 514 and 515, 516 and 517, 518 and 519, 520 and 521, 522 and 523, 524 and 525, 526 and 527, 528 and 529, 530 and 531, 532 and 533, 534 and 535, 536 and 537, 538 and 539, 540 and 541, 542 and 543, 544 and 545, 546 and 547, 548 and 549, 550 and 551, 552 and 553, 554 and 555, 556 and 557, 558 and 559, 560 and 561, 562 and 563, 564 and 565, 566 and 567, 568 and 569, 570 and 571, 572 and 573, 574 and 575, and 576 and 577.

[0092] In some embodiments, a spHT comprises a peptide and polypeptide (or two polypeptides) pair corresponding to two of SEQ ID NOS: 2-577 together comprising amino acids corresponding to each position in SEQ ID NO: 1, but with a deletion of up to 40 amino acids in length (e.g., 1, 2, 3, 4, 5, 6, 7, 8, 9, 10, 15, 20, 25, 30, 35, 40, or ranges therebetween) at the C-terminus or N-terminus of one or both of fragments. For example, a pair corresponding to SEQ ID NOS: 7 and 28 together correspond to positions of SEQ ID NO: 1, but with an 11-residue deletion. In some embodiments, any pairs of SEQ ID NOS: 2-577, together corresponding to the sequence of SEQ ID NO: 1, but with deletions of up to 40 amino acids, are within the scope of spHTs herein. In some embodiments, the deletion is adjacent to the split site. In some embodiments, the deletion corresponds to the N- or C-terminus of SEQ ID NO: 1.

[0093] In some embodiments, a spHT comprises a peptide and polypeptide (or two polypeptides) pair corresponding to two of SEQ ID NOS: 2-577 together comprising amino acids corresponding to each position in SEQ ID NO: 1, but with a duplication of up to 40 amino acids in length (e.g., 1, 2, 3, 4, 5, 6, 7, 8, 9, 10, 15, 20, 25, 30, 35, 40, or ranges therebetween) at the C-terminus or N-terminus of one or both of fragments. For example, a pair corresponding to SEQ ID NOS: 6 and 29 together correspond to positions of SEQ ID NO: 1, but with an 11 residue duplication. In some embodiments, any pairs of SEQ ID NOS: 2-577, together corresponding to the sequence of SEQ ID NO: 1, but with duplications of up to 40 amino acids, are within the scope of spHTs herein. In some embodiments, the duplication is adjacent to the split site. In some embodiments, the duplication corresponds to the N- or C-terminus of SEQ ID NO: 1.

[0094] Fragments utilizing any sp sites, for example, corresponding to a position between position 5 and position 290 of SEQ ID NO: 1, are readily envisioned and within the scope herein.

[0095] In some embodiments, spHTs are provided with a sp site corresponding to position 5, 6, 7, 8, 9, 10, 11, 12, 13, 14, 15, 16, 17, 18, 19, 31, 21, 22, 23, 24, 25, 26, 27, 28, 29, 30, 31, 32, 33, 34, 35, 36, 37, 38, 39, 40, 41, 42, 43, 44, 45, 46, 47, 48, 49, 50, 51, 52, 53, 54, 55, 56, 57, 58, 59, 60, 61, 62, 63, 64, 65, 66, 67, 68, 69, 70, 71, 72, 73, 74, 75, 76, 77, 78, 79, 80, 81, 82, 83, 84, 85, 86, 87, 88, 89, 90, 91, 92, 93, 94, 95, 96, 97, 98, 99, 100, 101, 102, 313, 104, 105, 106, 107, 108, 109, 110, 111, 112, 113, 114, 115, 116, 117, 118, 119, 120, 121, 122, 123, 124, 125, 126, 127, 128, 129, 130, 131, 132, 133, 134, 135, 136, 137, 138, 139, 140, 141, 142, 143, 144, 145, 146, 147, 148, 149, 150, 151, 152, 153, 154, 155, 156, 157, 158, 159, 160, 161, 162, 163, 164, 165, 166, 167, 168, 169, 170, 171, 172, 173, 174, 175, 176, 177, 178, 179, 180, 181, 182, 183, 184, 185, 186, 187, 188, 189, 190, 191, 192, 193, 194, 195, 196, 197, 198, 199, 310, 311, 312, 313, 314, 315, 316, 317, 318, 319, 210, 211, 212, 213, 214, 215, 216, 217, 218, 219, 220, 221, 222, 223, 224, 225, 226, 227, 228, 229, 230, 231, 232, 233, 234, 235, 236, 237, 238, 239, 240, 241, 242, 243, 244, 245, 246, 247, 248, 249, 250, 251, 252, 253, 254, 255, 256, 257, 258, 259, 260, 261, 262, 263, 264, 265, 266, 267, 268, 269, 270, 271, 272, 273, 274, 275, 276, 277, 278, 279, 280, 281, 282, 283, 284, 285, 286, 287, 288, 289, or 290 of SEQ ID NO: 1.

[0096] In some embodiments, spHTs are provided with a sp site corresponding to a position between positions 5 and 13, 36 and 51, 63 and 72, 84 and 92, 104 and 130, 142 and 148, 160 and 174, 186 and 189, 311 and 313, 221 and 229, or 269 and 290 of SEQ ID NO: 1.

[0097] In some embodiments, the spHT peptides and polypeptides herein (e.g., fused to dsRNA binding domains) comprise one or more (e.g., 2, 3, 4, 5, 6, 7, 8, 9 10, 11, 12, 13, 14, 15, 16, 17, 18, 19m 20, 25, 30, 35, 40, 50, 75, or more) substitutions or deletions relative to one of SEQ ID NOS: 2-557. In some embodiments, sp peptides and polypeptides are provided (e.g., fused to dsRNA binding domains) having 70%-100% sequence identity to one of SEQ ID NOS: 2-557 (e.g., >70% sequence identity, >75% sequence identity, >80% sequence identity, >85% sequence identity, >90% sequence identity, >95% sequence identity, >96% sequence identity, >97% sequence identity, >98% sequence identity, >99% sequence identity). In some embodiments, sp peptides and polypeptides are provided (e.g., fused to dsRNA binding domains) having 70%-100% sequence similarity to one of SEQ ID NOS: 2-557 (e.g., >70% sequence similarity, >75% sequence similarity, >80% sequence similarity, >85% sequence similarity, >90% sequence similarity, >95% sequence similarity, >96% sequence similarity, >97% sequence similarity, >98% sequence similarity, >99% sequence similarity).

[0098] In some embodiments, pairs of sp peptides and/or polypeptides are provided (e.g., fused to dsRNA binding domains) that are capable of forming active sp dehalogenase complexes (active spHT complexes). In some embodiments, such pairs comprise at least 70% sequence identity or similarity to two of SEQ ID NOS: 2-557, and together comprise residues corresponding to 100% of the positions in SEQ ID NO: 1, allowing for up to 40 deletions or duplications at the C- or N-terminus of the peptides/polypeptides.

[0099] In some embodiments, the first fragment of a spHT complementary pair (e.g., fused to a dsRNA binding domain) corresponds to position 1 through position 5, 6, 7, 8, 9, 10, 11, 12, 13, 14, 15, 16, 17, 18, 19, 31, 21, 22, 23, 24, 25, 26, 27, 28, 29, 30, 31, 32, 33, 34, 35, 36, 37, 38, 39, 40, 41, 42, 43, 44, 45, 46, 47, 48, 49, 50, 51, 52, 53, 54, 55, 56, 57, 58, 59, 60, 61, 62, 63, 64, 65, 66, 67, 68, 69, 70, 71, 72, 73, 74, 75, 76, 77, 78, 79, 80, 81, 82, 83, 84, 85, 86, 87, 88, 89, 90, 91, 92, 93, 94, 95, 96, 97, 98, 99, 100, 101, 102, 313, 104, 105, 106, 107, 108, 109, 110, 111, 112, 113, 114, 115, 116, 117, 118, 119, 120, 121, 122, 123, 124, 125, 126, 127, 128, 129, 130, 131, 132, 133, 134, 135, 136, 137, 138, 139, 140, 141, 142, 143, 144, 145, 146, 147, 148, 149, 150, 151, 152, 153, 154, 155, 156, 157, 158, 159, 160, 161, 162, 163, 164, 165, 166, 167, 168, 169, 170, 171, 172, 173, 174, 175, 176, 177, 178, 179, 180, 181, 182, 183, 184, 185, 186, 187, 188, 189, 190, 191, 192, 193, 194, 195, 196, 197, 198, 199, 310, 311, 312, 313, 314, 315, 316, 317, 318, 319, 210, 211, 212, 213, 214, 215, 216, 217, 218, 219, 220, 221, 222, 223, 224, 225, 226, 227, 228, 229, 230, 231, 232, 233, 234, 235, 236, 237, 238, 239, 240, 241, 242, 243, 244, 245, 246, 247, 248, 249, 250, 251, 252, 253, 254, 255, 256, 257, 258, 259, 260, 261, 262, 263, 264, 265, 266, 267, 268, 269, 270, 271, 272, 273, 274, 275, 276, 277, 278, 279, 280, 281, 282, 283, 284, 285, 286, 287, 288, 289, or 290 of SEQ ID NO: 1.

[0100] In some embodiments, the second fragment of a spHT complementary pair (e.g., fused to a dsRNA binding domain) corresponds to position 7, 8, 9, 10, 11, 12, 13, 14, 15, 16, 17, 18, 19, 31, 21, 22, 23, 24, 25, 26, 27, 28, 29, 30, 31, 32, 33, 34, 35, 36, 37, 38, 39, 40, 41, 42, 43, 44, 45, 46, 47, 48, 49, 50, 51, 52, 53, 54, 55, 56, 57, 58, 59, 60, 61, 62, 63, 64, 65, 66, 67, 68, 69, 70, 71, 72, 73, 74, 75, 76, 77, 78, 79, 80, 81, 82, 83, 84, 85, 86, 87, 88, 89, 90, 91, 92, 93, 94, 95, 96, 97, 98, 99, 100, 101, 102, 313, 104, 105, 106, 107, 108, 109, 110, 111, 112, 113, 114, 115, 116, 117, 118, 119, 120, 121, 122, 123, 124, 125, 126, 127, 128, 129, 130, 131, 132, 133, 134, 135, 136, 137, 138, 139, 140, 141, 142, 143, 144, 145, 146, 147, 148, 149, 150, 151, 152, 153, 154, 155, 156, 157, 158, 159, 160, 161, 162, 163, 164, 165, 166, 167, 168, 169, 170, 171, 172, 173, 174, 175, 176, 177, 178, 179, 180, 181, 182, 183, 184, 185, 186, 187, 188, 189, 190, 191, 192, 193, 194, 195, 196, 197, 198, 199, 310, 311, 312, 313, 314, 315, 316, 317, 318, 319, 210, 211, 212, 213, 214, 215, 216, 217, 218, 219, 220, 221, 222, 223, 224, 225, 226, 227, 228, 229, 230, 231, 232, 233, 234, 235, 236, 237, 238, 239, 240, 241, 242, 243, 244, 245, 246, 247, 248, 249, 250, 251, 252, 253, 254, 255, 256, 257, 258, 259, 260, 261, 262, 263, 264, 265, 266, 267, 268, 269, 270, 271, 272, 273, 274, 275, 276, 277, 278, 279, 280, 281, 282, 283, 284, 285, 286, 287, 288, 289, or 290 through position 294 of SEQ ID NO: 1.

[0101] In some embodiments, the duplicated portion of a spHT complementary pair is 1-40 amino acids in length (e.g., 1, 2, 3, 4, 5, 6, 7, 8, 9, 10, 11, 12, 13, 14, 15, 16, 17, 18, 19, 31, 21, 22, 23, 24, 25, 26, 27, 28, 29, 30, 31, 32, 33, 34, 35, 36, 37, 38, 39, 40, or ranges therebetween).

[0102] In some embodiments, the deleted portion of a spHTs complementary pair is 1-40 amino acids in length (e.g., 1, 2, 3, 4, 5, 6, 7, 8, 9, 10, 11, 12, 13, 14, 15, 16, 17, 18, 19, 31, 21, 22, 23, 24, 25, 26, 27, 28, 29, 30, 31, 32, 33, 34, 35, 36, 37, 38, 39, 40, or ranges therebetween).

[0103] The exemplary spHT fragment sequences of SEQ ID NOS: 2-577 comprise 100% sequence identity to portions of SEQ ID NO: 1; there are no portions of these sequences that do not align with 100% sequence identity to SEQ ID NO: 1. However, as described herein, spHT peptides and polypeptides may have less than 100% sequence identity with SEQ ID NO: 1 (e.g., >70%, >75%, >80%, >85%, >90%, >95%, >96%, >97%, >98%, >99%, but less than 100% sequence identity). Therefore, peptides and polypeptide having less than 100% sequence identity with one or SEQ ID NOS: 2-577 (e.g., >70%, >75%, >80%, >85%, >90%, >95%, >96%, >97%, >98%, >99%, but less than 100% sequence identity) are provided herein and find use in the complementary pairs and complexes herein.

[0104] In some embodiments, a spHT complementary pair herein comprises a peptide corresponding to SEQ ID NO: 578 and a polypeptide corresponding to SEQ ID NO: 1188. SEQ NOS: 578 and 1188 are fragments of SEQ ID NO: 1 and have 100% sequence identity to portions of SEQ ID NO: 1. In some embodiments, a spHT complementary pair comprises a peptide having 100% sequence identity to SEQ ID NO: 578; such a peptide is referred to herein as “SmHT.” In some embodiments, a spHT complementary pair comprises a polypeptide having 100% sequence identity to SEQ ID NO: 1188; such a polypeptide is referred to herein as “LgHT.” Extensive experiments have been conducted to analyze variants of SmHT and LgHT. SEQ ID NOS: 579-1187 correspond to peptide variants having at least one and up to all positions of SEQ ID NO: 588 substituted. A peptide of each of SEQ ID NOS: 578-1187 was synthesized and tested for various characteristics, including the ability to form an active complex with a complementary LgHT variant polypeptide. SEQ ID NOS: 1189-3033 correspond to polypeptide variants having one or more substitutions relative to SEQ ID NO: 1188. A polypeptide of each of SEQ ID NOS: 1188-3033 was synthesized and tested for various characteristics, including the ability to form an active complex with a complementary SmHT variant peptide.

[0105] In some embodiments, provided herein is a SmHT peptide or SmHT variant peptide (e.g., fused to a dsRNA binding domain) having at least 70% (e.g., 70%, 75%, 80%, 85%, 90%, 95%, 100%, or ranges therebetween) sequence similarity (e.g., conservative or semi-conservative similarity) with one of SEQ ID NOS: 578-1187. In some embodiments, a peptide (e.g., fused to a dsRNA binding domain) corresponds to SmHT (SEQ ID NO: 578), but with one or more (e.g., 2, 3, 4, 5, 6, 7, 8, 9, 10, 11, 12, 13, 14, 15, 16, 17, or ranges therebetween) of the substitutions of one or more of SEQ ID NOS: 588-1187 relative to SEQ ID NO: 578. In some embodiments, a SmHT variant (e.g., fused to a dsRNA binding domain) has 1-8 (e.g., 1, 2, 3, 4, 5, 6, 7, 8, or ranges therebetween) non-conservative substitutions relative to one of SEQ ID NOS: 578-1187. In some embodiments, provided herein is a SmHT peptide or SmHT variant peptide (e.g., fused to a dsRNA binding domain) comprising:
[0106] X₁ X₂ X₃ X₄X₅ (F/W/Y/M/H) X₇ (F/W/Y/D/R) X₉X₁₀X₁₁ (F/W/Y/M/H/R) (V/I/L/M/A/C)
[0107] X₁₄ (V/I/L/A/C/MI/L/F/W) X₁₆ X₁₇ (SEQ ID NO: 3034); and/or
[0108] X₁ X₂ X₃ X₄ X₅ (F/W/Y) X₇ (F/W/Y) X₉X₁₀X₁₁ (F/W/Y) (V/I/L/M) X₁₄ (V/I/L) X₁₆X₁₇ (SEQ ID NO: 3035);
   wherein each X is any amino acid (e.g., proteinogenic amino acid).

[0109] In some embodiments, provided herein is a LgHT polypeptide or LgHT variant polypeptide (e.g., fused to a dsRNA binding domain) having at least 70% (e.g., 70%, 75%, 80%, 85%, 90%, 95%, 100%, or ranges therebetween) sequence similarity (e.g., conservative or semi-conservative similarity) with one of SEQ ID NOS: 1188-3033. In some embodiments, a polypeptide (e.g., within a fusion herein or as a standalone reporter or tag, etc.) corresponds to LgHT (SEQ ID NO: 1188), but with one or more (e.g., 2, 3, 4, 5, 6, 7, 8, 9, 10, 11, 12, 13, 14, 15, 16, 17, 18, 19, 20, 25, 30, or more, or ranges therebetween) of the substitutions of one or more of SEQ ID NOS: 1189-3033 relative to SEQ ID NO: 1188. In some embodiments, a LgHT variant (e.g., fused to a dsRNA binding domain) has at least 70% (e.g., 70%, 75%, 80%, 85%, 90%, 95%, 100%, or ranges therebetween) sequence identity with one of SEQ ID NOS: 1188-3033.

### B. NanoLuc

[0110] In some embodiments, provided herein are fusions of dsRNA bounding domains with complementary pairs of peptides/polypeptides capable of interacting with each other (e.g., facilitated by binding of dsRNA binding domains to a dsRNA) to form a luminescent complex capable of interacting with a luminescent substrate to produce luminescence. In some embodiments, the luminescent complex is capable of producing significantly enhanced luminescence upon interaction with the luminescent substrate than either of the complementary peptides/polypeptides alone or in the presence of the luminescent substrate without the other peptide/polypeptide of the complementary pair.

[0111] In some embodiments, a first fusion is provided comprising a first complementary peptide or polypeptide fragment of a luciferase, and a second fusion is provided comprising a second complementary peptide or polypeptide fragment of the luciferase, wherein upon interacting (e.g., facilitated by binding of the dsRNA bounding domains to a dsRNA), the complementary peptide(s)/polypeptide(s) form an active luciferase complex capable generating luminescence in the presence (upon contacting) a suitable substrate for the luciferase. In some embodiments, the complementary peptide(s)/polypeptide(s) are fragments of a split luciferase.

[0112] In some embodiments, the peptide/polypeptide components capable of forming a luciferase complex are fragments of a split luciferase, such as those derived from the commercially available NANOLUC luciferase (Promega), including but not limited to the NANOBIT (Promega) SMBIT peptide (Promega) and the LGBIT polypeptide (Promega), which are capable of facilitated formation of a luminescent complex. In some embodiments, the peptide/polypeptide components capable of forming a luciferase complex are any of the peptide and polypeptide components described in U.S. Pat. No. 9,797,889 and/or U.S. application Ser. No. 16/439,565 (incorporated by reference in their entireties).

[0113] In some embodiments, provided herein are compositions (e.g., fusion polypeptides) and systems (e.g., multiple complementary fusion polypeptides, substrates, etc.) comprising peptide/polypeptide fragments capable of interacting (e.g., facilitated by binding of dsRNA bounding domains fused thereto to a dsRNA) to form an active luminescent complex capable of utilizing an appropriate substrate to generate luminescence.

[0114] In some embodiments, provided herein are fusion polypeptides and systems thereof (e.g., multiple complementary fusion polypeptides, substrates, etc.) comprising dsRNA bounding domains fused to complementary peptide/polypeptide fragments capable of interacting (e.g., facilitated by binding of dsRNA bounding domains fused thereto to a dsRNA) to form an active bioluminescent complex capable of generating luminescence upon interaction with an appropriate luminescent substrate. In some embodiments, a first fusion is provided comprising a peptide/polypeptide fragment of a luminescent protein, and a second fusion is provided comprising a complementary peptide/polypeptide fragment of the luminescent protein, wherein upon interacting (e.g., facilitated by binding of dsRNA bounding domains fused thereto to a dsRNA), the complementary peptide/polypeptide fragments form an active bioluminescent complex capable of generating luminescence upon interaction with an appropriate luminescent substrate. In some embodiments, the complementary peptide(s)/polypeptide(s) are fragments of a split luminescent protein (e.g., luciferase).

[0115] In some embodiments, provided herein, are pairs of fusions of dsRNA binding domains with the components of a binary complementation system capable of forming a luminescent complex. In other embodiments, a tertiary or multiplex complementation system (e.g., 3 or more components) finds use in the fusions with dsRNA binding domains and systems herein. For example, fusions of dsRNA binding domains with three or more components of a system may be provided. Alternatively, a system may comprise two fusions of dsRNA binding domains with components of a luminescent complex, and one or more additional components of the luminescent complex as isolated components.

[0116] The native Oplophorus gracilirostris luciferase (OgLuc) and commercially-available NANOLUC luciferase (Promega Corporation) each comprise polypeptides of 10 β (beta) strands (β1, β2, β3, β4, β5, β6, β7, β8, β9, β10). U.S. Pat. No. 9,797,889 (herein incorporated by reference in its entirety) describes development and use of a complementation system comprising a β1-9-like polypeptide and a β10-like peptide (certain OgLuc/NANOLUC-based polypeptide and peptide sequences in polypeptide and peptide sequences in U.S. Pat. No. 9,797,889 differ from the corresponding sequences in NANOLUC and wild-type native OgLuc). Similarly, U.S. application Ser. No. 16/439,565 (herein incorporated by reference in its entirety) describes the development and use of a complementation systems comprising two or more OgLuc/NANOLUC peptides and/or polypeptides (certain OgLuc/NANOLUC-based polypeptide and peptide sequences in U.S. patent Ser. No. 16/439,565 differ from the corresponding sequences in NANOLUC and wild-type native OgLuc).

[0117] In some embodiments, provided in the fusions with dsRNA binding domains herein is a peptide component of a binary bioluminescent complex having greater than 40% (e.g., >40%, >45%, >50%, >55%, >60%, >65%, >70%, >75%, >80%, >85%, >90%, >95%, >98%, >99%, 100%) sequence identity with SEQ ID NO: 3036, wherein a detectable bioluminescent signal is produced when the peptide component of a binary bioluminescent complex contacts a polypeptide consisting of SEQ ID NO: 3037 (e.g., facilitated by binding of the dsRNA binding domain to a dsRNA) in the presence of a substrate for the bioluminescent complex (e.g., greater luminescence that the components of the complex in the presence of the substrate). In some embodiments, the peptide (e.g., within a dsRNA binding domain fusion) has less than 100% sequence identity with SEQ ID NO: 3036. In some embodiments, a detectable bioluminescent signal is produced when the peptide component of a binary bioluminescent complex contacts (e.g., facilitated by binding of dsRNA binding domains to a dsRNA) a polypeptide component of the binary bioluminescent complex having greater than 40% (e.g., >40%, >45%, >50%, >55%, >60%, >65%, >70%, >75%, >80%, >85%, >90%, >95%, >98%, >99%, 100%) sequence identity with SEQ ID NO: 3037. In certain embodiments, the detectable bioluminescent signal is produced, or is substantially increased, when the peptide associates with the polypeptide comprising or consisting of SEQ ID NO: 3037. In preferred embodiments, the peptide exhibits alteration (e.g., enhancement) of one or more traits compared to a peptide of SEQ ID NO: 3038 or 3039, wherein the traits are selected from: affinity for the polypeptide consisting of SEQ ID NO: 3037, expression, intracellular solubility, intracellular stability, and bioluminescent activity when combined with the polypeptide consisting of SEQ ID NO: 3037 (e.g., within the context of the dsRNA binding domain fusions herein).

[0118] Exemplary sequences of peptide components of binary bioluminescent complexes that find use in the embodiments herein (e.g., as portions of fusions with dsRNA binding domain fusions) are described, for example, in U.S. Pat. No. 9,797,889 (incorporated by reference in its entirety). Although a peptide component of binary bioluminescent complexes (e.g., within fusions herein) are not limited to these sequences, in some embodiments, a peptide component of a binary bioluminescent complex herein may be selected from amino acid sequences of SEQ ID NOS: 3-438 and 2162-2365 of U.S. Pat. No. 9,797,889 (incorporated by reference in its entirety).

[0119] In some embodiments, provided herein is a peptide component of a binary bioluminescent complex (e.g., as a fusion with a dsRNA binding domain) having greater than 40% (e.g., >40%, >45%, >50%, >55%, >60%, >65%, >70%, >75%, >80%, >85%, >90%, >95%, >98%, >99%, 100%) sequence identity with SEQ ID NO: 3038, wherein a detectable bioluminescent signal is produced when the peptide component of the binary bioluminescent complex contacts (e.g., facilitated by binding of a dsRNA binding domain fused thereto to a dsRNA) a polypeptide consisting of SEQ ID NO: 3037 (e.g., fused to a dsRNA binding domain) in the presence of a substrate for the bioluminescent complex (e.g., greater luminescence that the components of the complex in the presence of the substrate). In some embodiments, the peptide has less than 100% sequence identity with SEQ ID NO: 3036. In some embodiments, a detectable bioluminescent signal is produced when the peptide component of a binary bioluminescent complex (e.g., fused to a dsRNA binding domain) contacts a polypeptide component of the binary bioluminescent complex (e.g., fused to a dsRNA binding domain) having greater than 40% (e.g., >40%, >45%, >50%, >55%, >60%, >65%, >70%, >75%, >80%, >85%, >90%, >95%, >98%, >99%, 100%) sequence identity with SEQ ID NO: 3037. In certain embodiments, the detectable bioluminescent signal is produced, or is substantially increased, when the peptide associates with the polypeptide comprising or consisting of SEQ ID NO: 3037.

[0120] Exemplary sequences of polypeptide components of binary bioluminescent complexes that find use in the embodiments herein (e.g., as fusions with a dsRNA binding domain) are described, for example, in U.S. Pat. No. 9,797,889 (incorporated by reference in its entirety). Although the peptide components of binary bioluminescent complexes herein are not limited to these sequences, in some embodiments, the polypeptide component of a binary bioluminescent complex herein may be selected from amino acid sequences of SEQ ID NOS: 441-2156 of U.S. Pat. No. 9,797,889 (incorporated by reference in its entirety).

[0121] In some embodiments, provided herein is a fusion of a dsRNA binding domain and a polypeptide component of a binary bioluminescent complex having greater than 40% (e.g., >40%, >45%, >50%, >55%, >60%, >65%, >70%, >75%, >80%, >85%, >90%, >95%, >98%, >99%, 100%) sequence identity with SEQ ID NO: 3037, wherein a detectable bioluminescent signal is produced when the polypeptide contacts a peptide consisting of SEQ ID NO: 3036 or 3038 (e.g., within a fusion herein) in the presence of a substrate for the bioluminescent complex (e.g., greater luminescence that the components of the complex in the presence of the substrate).

[0122] In some embodiments, provided herein are pairs of fusions, each comprising a dsRNA binding domain and the first fusion comprising a first component of a bioluminescent complex having 40% or greater (e.g., 40%, 45%, 50%, 55%, 60%, 65%, 70%, 75%, 80%, 85%, 90%, 95%, or more (e.g., 100%), or ranges therebetween) sequence identity to a first fragment of SEQ ID NO: 3041 and the second fusion comprising a second component of the bioluminescent complex comprising 40% or greater (e.g., 40%, 45%, 50%, 55%, 60%, 65%, 70%, 75%, 80%, 85%, 90%, 95%, or more (e.g., 100%), or ranges therebetween) sequence identity to the complementary portion of SEQ ID NO: 3041. In some embodiments, the first component comprises 40% or greater (e.g., 40%, 45%, 50%, 55%, 60%, 65%, 70%, 75%, 80%, 85%, 90%, 95%, or more (e.g., 100%), or ranges therebetween) sequence identity to SEQ ID NO: 3042, and the complementary component comprises 40% or greater (e.g., 40%, 45%, 50%, 55%, 60%, 65%, 70%, 75%, 80%, 85%, 90%, 95%, or more (e.g., 100%), or ranges therebetween) sequence identity to SEQ ID NO: 3050. In some embodiments, the first component comprises 40% or greater (e.g., 40%, 45%, 50%, 55%, 60%, 65%, 70%, 75%, 80%, 85%, 90%, 95%, or more (e.g., 100%), or ranges therebetween) sequence identity to SEQ ID NO: 3043, and the complementary component comprises 40% or greater (e.g., 40%, 45%, 50%, 55%, 60%, 65%, 70%, 75%, 80%, 85%, 90%, 95%, or more (e.g., 100%), or ranges therebetween) sequence identity to SEQ ID NO: 3051. In some embodiments, the first component comprises 40% or greater (e.g., 40%, 45%, 50%, 55%, 60%, 65%, 70%, 75%, 80%, 85%, 90%, 95%, or more (e.g., 100%), or ranges therebetween) sequence identity to SEQ ID NO: 3044, and the complementary component comprises 40% or greater (e.g., 40%, 45%, 50%, 55%, 60%, 65%, 70%, 75%, 80%, 85%, 90%, 95%, or more (e.g., 100%), or ranges therebetween) sequence identity to SEQ ID NO: 3052. In some embodiments, the first component comprises 40% or greater (e.g., 40%, 45%, 50%, 55%, 60%, 65%, 70%, 75%, 80%, 85%, 90%, 95%, or more (e.g., 100%), or ranges therebetween) sequence identity to SEQ ID NO: 3045, and the complementary component comprises 40% or greater (e.g., 40%, 45%, 50%, 55%, 60%, 65%, 70%, 75%, 80%, 85%, 90%, 95%, or more (e.g., 100%), or ranges therebetween) sequence identity to SEQ ID NO: 3053. In some embodiments, the bioluminescent signal is substantially increased when the first component associates with the complementary component (e.g., facilitated by the fused dsRNA binding domains binding to a dsRNA).

[0123] Exemplary sequences of peptide and polypeptide components of binary or multipartite bioluminescent complexes that find use in the fusions with dsRNA binding domains in embodiments herein are described, for example, in U.S. application Ser. No. 16/439,565 (incorporated by reference in its entirety). Although the peptide and polypeptide components of binary or multipartite bioluminescent complexes herein are not limited to these sequences, in some embodiments, a peptide or polypeptide component of a binary or multipartite bioluminescent complex herein may be selected from amino acid sequences of SEQ ID NOS: 1-804 of U.S. application Ser. No. 16/439,565 (incorporated by reference in its entirety).

[0124] In some embodiments, provided herein is a β6-7-like peptide (e.g., within a fusion described herein) comprising SEQ ID NOS: 3054 and 3055. In some embodiments, provided herein is a β6-7-like peptide having 40% or greater (e.g., 40%, 45%, 50%, 55%, 60%, 65%, 70%, 75%, 80%, 85%, 90%, 95%, or more (e.g., 100%), or ranges therebetween) sequence identity with SEQ ID NOS: 3054 and 3055.

[0125] In some embodiments, provided herein is a β7-8-like peptide (e.g., within a fusion described herein) comprising SEQ ID NOS: 3055 and 3056. In some embodiments, provided herein is a β7-8-like peptide (e.g., within a fusion described herein) having 40% or greater (e.g., 40%, 45%, 50%, 55%, 60%, 65%, 70%, 75%, 80%, 85%, 90%, 95%, or more (e.g., 100%), or ranges therebetween) sequence identity with SEQ ID NOS: 3055 and 3056.

[0126] In some embodiments, provided herein is a β8-9-like peptide (e.g., within a fusion described herein) comprising SEQ ID NOS: 3056/3059 or 3056/3060. In some embodiments, provided herein is a β8-9-like peptide (e.g., within a fusion described herein) having 40% or greater (e.g., 40%, 45%, 50%, 55%, 60%, 65%, 70%, 75%, 80%, 85%, 90%, 95%, or more (e.g., 100%), or ranges therebetween) sequence identity with NOS: 3056/3059 or 3056/3060.

[0127] In some embodiments, provided herein is a β9-10-like peptide (e.g., within a fusion described herein) comprising SEQ ID NOS: 3059/3057, 3059/3058, 3060/3057, or 3060/3058. In some embodiments, provided herein is a β8-9-like peptide (e.g., within a fusion described herein) having 40% or greater (e.g., 40%, 45%, 50%, 55%, 60%, 65%, 70%, 75%, 80%, 85%, 90%, 95%, or more (e.g., 100%), or ranges therebetween) sequence identity with NOS: SEQ ID NOS: 3059/3057, 3059/3058, 3060/3057, or 3060/3058.

[0128] In some embodiments, provided herein is a β6-8-like peptide or polypeptide (e.g., within a fusion described herein) comprising SEQ ID NOS: 3054-3056. In some embodiments, provided herein is a β6-8-like peptide or polypeptide (e.g., within a fusion described herein) having 40% or greater (e.g., 40%, 45%, 50%, 55%, 60%, 65%, 70%, 75%, 80%, 85%, 90%, 95%, or more (e.g., 100%), or ranges therebetween) sequence identity with NOS: SEQ ID NOS: 3054-3056.

[0129] In some embodiments, provided herein is a β7-9-like peptide or polypeptide (e.g., within a fusion described herein) comprising SEQ ID NOS: 3055/3056/3059 or 3055/3056/3060. In some embodiments, provided herein is a β7-9-like peptide or polypeptide (e.g., within a fusion described herein) having 40% or greater (e.g., 40%, 45%, 50%, 55%, 60%, 65%, 70%, 75%, 80%, 85%, 90%, 95%, or more (e.g., 100%), or ranges therebetween) sequence identity with NOS: SEQ ID NOS: 3055/3056/3059 or 3055/3056/3060.

[0130] In some embodiments, provided herein is a β8-10-like peptide or polypeptide (e.g., within a fusion described herein) comprising SEQ ID NOS: 3056/3059/3057, 3056/3059/3058, 3056/3060/3057, or 3056/3060/3058. In some embodiments, provided herein is a β7-9-like peptide or polypeptide (e.g., within a fusion described herein) having 40% or greater (e.g., 40%, 45%, 50%, 55%, 60%, 65%, 70%, 75%, 80%, 85%, 90%, 95%, or more (e.g., 100%), or ranges therebetween) sequence identity with NOS: SEQ ID NOS: 3056/3059/3057, 3056/3059/3058, 3056/3060/3057, or 3056/3060/3058.

### C. Fluorescent Protein

[0131] In some embodiments, provided herein are fusions of dsRNA bounding domains with complementary pairs of peptides/polypeptides capable of interacting with each other (e.g., facilitated by binding of dsRNA binding domains to a dsRNA) to form a fluorescent complex capable emitting fluorescent light within a detectable range (emission spectra) upon excitation with appropriate wavelength(s) (excitation spectra). In some embodiments, the fluorescent complex is capable of producing significantly enhanced fluorescence than either of the complementary peptides/polypeptides alone.

[0132] In some embodiments, a first fusion is provided comprising a first complementary peptide or polypeptide fragment of a fluorescent protein, and a second fusion is provided comprising a second complementary peptide or polypeptide fragment of the fluorescent protein, wherein upon interacting (e.g., facilitated by binding of the dsRNA bounding domains to a dsRNA), the complementary peptide(s)/polypeptide(s) form an active fluorescent complex capable of emitting fluorescent light within a detectable range (emission spectra) upon excitation with appropriate wavelength(s) (excitation spectra). In some embodiments, the complementary peptide(s)/polypeptide(s) are fragments of a fluorescent protein.

[0133] In some embodiments, fragments of a fluorescent protein are provided for use in embodiments herein. Exemplary fluorescent proteins include, but are not limited to yellow fluorescent protein (YFP), green fluorescent protein (GFP), cyan fluorescent protein (CFP), red fluorescent protein (RFP), umbelliferone, fluorescein, fluorescein isothiocyanate, rhodamine, dichlorotriazinylamine fluorescein, cyanines, dansyl chloride, phycocyanin, and phycoerythrin. Table 1 provides examples of existing split fluorescent proteins that may find use (e.g., with the two components fused to dsRNA bounding domains) in embodiments herein.

TABLE 1
Exemplary split fluorescent proteins

| | | Citation (incorporated by |
|---|---|---|
| Fluorescent Protein | Description | reference in their entireties) |
| EBFP2 | EBFP2(1-10) and | Multiplexed labeling of cellular proteins with |
| | Capri(1-10) for use with | split fluorescent protein tags. Tamura R, Jiang |
| | GFP(11) | F, Xie J, Kamiyama D. Commun Biol. 2021 |
| Cerulean | Cerulean(1-10) for use | Multiplexed labeling of cellular proteins with |
| | with GFP(11) | split fluorescent protein tags. Tamura R, Jiang |
| | | F, Xie J, Kamiyama D. Commun Biol. 2021 |
| ECFP | C155 of ECFP pairs with | Identification of new fluorescent protein |
| | N173 derived from | fragments for bimolecular fluorescence |
| | Cerulean or Venus | complementation analysis under physiological |
| | | conditions. Shyu Y J, Liu H, Deng X, Hu C D. |
| | | Biotechniques. 2006 |
| sfGFP | Split super-folder GFP, | Versatile protein tagging in cells with split |
| | our most-requested | fluorescent protein. Kamiyama et al. Nat |
| | GFP(1-10) and GFP(11) | Commun. 2016 |
| spGFP | Split superpositive GFP | Split-superpositive GFP reassembly is a fast, |
| | | efficient, and robust method for detecting |
| | | protein-protein interactions in vivo. Blakeley |
| | | B D, Chapman A M, McNaughton B R. Mol |
| | | Biosyst. 2012 |
| mNeonGreen2 | mNG2(1-10) and | Improved split fluorescent proteins for |
| | mNG2(11) | endogenous protein labeling. Feng et al. Nat |
| | | Commun. 2017 |
| mNeonGreen3 | mNG3K(1-10) and | Improved yellow-green split fluorescent |
| | mNG3A(1-10) for use | proteins for protein labeling and signal |
| | with mNG2(11) | amplification. Zhou S, Feng S, Brown D, |
| | | Huang B. PLoS One. 2020 |
| Venus | pBiFC-VN173, pBiFC- | Identification of new fluorescent protein |
| | VC155 | fragments for bimolecular fluorescence |
| | | complementation analysis under physiological |
| | | conditions. Shyu Y J, Liu H, Deng X, Hu C D. |
| | | Biotechniques. 2006 |
| Venus | Improved N-terminal | An improved bimolecular fluorescence |
| | fragment VN155(I152L), | complementation assay with a high signal-to- |
| | for use with VC155 | noise ratio. Kodama Y, Hu C D. |
| | | Biotechniques. 2010 |
| mVenus | pET-BiFC contains both | An enhanced recombinant amino-terminal |
| | fragments of split | acetylation system and novel in vivo high- |
| | mVenus (aa 155), | throughput screen for molecules affecting |
| | includes I152L in N- | alpha-synuclein oligomerisation. Eastwood T, |
| | terminal fragment | Baker K, Brooker H, Frank S, Mulvihill D P. |
| | | FEBS Lett. 2017 |
| mVenus | Split mVenus (aa 155), | Constant rate of p53 tetramerization in |
| | includes I152L in N- | response to DNA damage controls the p53 |
| | terminal fragment | response. Gaglia G, Lahav G. Mol Syst Biol. |
| | | 2014 |
| EYFP | Gateway vectors with | Arabidopsis homolog of the yeast TREX-2 |
| | EYFP split at 175 | mRNA export complex: components and |
| | | anchoring nucleoporin. Lu et al. Plant J. 2010 |
| mScarlet | Split-wrmScarlet variant | Split-wrmScarlet and split-sfGFP: tools for |
| | of mScarlet | faster, easier fluorescent labeling of |
| | | endogenous proteins in Caenorhabditis |
| | | elegans. Goudeau et al. Genetics. 2021 |
| mRuby4 | mRuby4(1-10), pairs with | Multiplexed labeling of cellular proteins with |
| | sfCherry2(11) | split fluorescent protein tags. Tamura R, Jiang |
| | | F, Xie J, Kamiyama D. Commun Biol. 2021 |
| sfCherry2 | sfCherry2(1-10) and | Improved split fluorescent proteins for |
| | sfCherry2(11), also | endogenous protein labeling. Feng et al. Nat |
| | photo-activatable variant | Commun. 2017 |
| | PAsfCherry2(1-10) | |
| sfCherry3 | Improved sfCherry3C(1- | Bright split red fluorescent proteins for the |
| | 10) for use with | visualization of endogenous proteins and |
| | sfCherry2(11) | synapses. Feng S et al. Commun Biol. 2019 |
| iRFP | iSplit, comprised of PAS | A Near-Infrared BiFC Reporter for In Vivo |
| | and GAF domains of | Imaging of Protein-Protein Interactions. |
| | iRFP713. Requires | Filonov G S, Verkhusha V V. Chem Biol. 2013 |
| | presence of heme | |
| | oxygenase for | |
| | chromophore formation | |
| | (abundant in eukaryotes) | |
| iRFP | GAF domains from | Bright monomeric near-infrared fluorescent |
| | miRFP709 and | proteins as tags and biosensors for multiscale |
| | miRFP670, pair with | imaging. Shcherbakova et al. Nat Commun. |
| | common PAS domain. | 2016 |
| | Requires presence of | |
| | heme oxygenase for | |
| | chromophore formation | |
| | (abundant in eukaryotes) | |
| FAST | Fluorescence-activating | A split fluorescent reporter with rapid and |
| | and absorption shifting | reversible complementation. Tebo A G, |
| | tag (FAST) for use with | Gautier A. Nat Commun. 2019 |
| | green-yellow or orange- | |
| | red fluorogen | |

[0134] As an exemplary embodiment, components of a split GFP (a peptide of SEQ ID NO: 3070 and a polypeptide of SEQ ID NO: 3068) were fused to dsRNA binding domains (SEQ ID NO: 3061) by linkers of SEQ ID NO: 3064. In some embodiments, provided herein are pairs of fusions, each comprising a dsRNA binding domain and the first fusion comprising a first component of a fluorescent complex having 40% or greater (e.g., 40%, 45%, 50%, 55%, 60%, 65%, 70%, 75%, 80%, 85%, 90%, 95%, or more (e.g., 100%), or ranges therebetween) sequence identity to a first fragment of SEQ ID NO: 3068 and the second fusion comprising a second component of the bioluminescent complex comprising 40% or greater (e.g., 40%, 45%, 50%, 55%, 60%, 65%, 70%, 75%, 80%, 85%, 90%, 95%, or more (e.g., 100%), or ranges therebetween) sequence identity to the complementary portion of SEQ ID NO: 3070.

### III. Fusions

[0135] In some embodiments, the fusions herein comprise a dsRNA binding domain directly linked to a component of a detectable complex. In some embodiments, a dsRNA binding domain comprises two directly linked dsRNA binding motifs. However, in other embodiments, the dsRNA binding domain and component of the detectable complex, and/or two dsRNA binding motifs in a dsRNA binding domain are fused via a linker. Such linkers may be of any suitable sequence and up to 100 amino acids in length (e.g., 1, 2, 3, 4, 5, 6, 7, 8, 9, 10, 15, 20, 25, 30, 35, 40, 445, 50, 60, 70, 80, 90, 100, or ranges therebetween). In some embodiments, the fusions herein comprise linkers to facilitate optimized geometries for complementation, ligand/substrate binding, dsRNA binding, etc.

[0136] In some embodiments, the components (e.g., dsRNA binding domain and/or motifs, detectable complex components, linkers, etc.) of a fusion herein may be arranged in any suitable orientation that allows for dsRNA binding, structural complementation to for a detectable complex, and detectable signal/activity from the detectable complex. In some embodiments, the C-terminus of a dsRNA binding domain is fused (e.g., directly or via a linker) to the N-terminus of a component of a detectable complex. In some embodiments, the N-terminus of a dsRNA binding domain is fused (e.g., directly or via a linker) to the C-terminus of a component of a detectable complex. In some embodiments, the C-terminus of a first dsRNA binding motif is fused (e.g., directly or via a linker) to the N-terminus of a component of a detectable complex, and the N-terminus of a second dsRNA binding motif is fused (e.g., directly or via a linker) to the C-terminus of the component of the detectable complex.

### IV. Substrates, Ligands, and Cofactors

[0137] In some embodiments, the detectable complexes that find use in embodiments herein utilize a substrate, ligand, cofactor, etc. to produce a detectable signal. In such embodiments, systems and methods are provided comprising the appropriate substrate, cofactor, and/or ligand for the detectable complex and components thereof.

[0138] In some embodiments, ligands/substrates of the invention are permeable to the plasma membranes of cells (i.e., capable of passing from the exterior of a cell (e.g., eukaryotic, prokaryotic) to the cellular interior without chemical, enzymatic, or mechanical disruption of the cell membrane).

[0139] In some embodiments, ligands herein comprise a cleavable linker, for example, those described in U.S. Pat. No. 10,618,907; incorporated by reference in its entirety.

[0140] For systems and methods herein utilizing various split enzymes as detectable complexes, the appropriate substrate and/or cofactor is provided for use with such systems. For example, dihydrofolate, ATP, tetramethylbenzidine, chorismite, etc. may be provided to generate a detectable signal with the assembled detectable complex.

### A. Haloalkyl Ligands

[0141] In embodiments in which a detectable complex comprises a modified dehalogenase complex (e.g., a split HALOTAG), systems and methods are provided comprising a haloalkane ligand. The modified dehalogenase complex (e.g., formed by structural complementation facilitated by binding of the fusions herein to dsRNA) binds the haloalkane ligand and a functional group linked to the haloalkane allows for detection. In some embodiments, the haloalkane ligand is of formula (I): R-linker-A-X, wherein R is a detectable functional group, wherein the linker is a multiatom straight or branched chain including C, N, S, or O, or a group that comprises one or more rings, e.g., saturated or unsaturated rings, such as one or more aryl rings, heteroaryl rings, or any combination thereof, wherein A-X is a ligand for a modified dehalogenase (e.g., HALOTAG) (e.g., wherein A is (CH₂)₄₋₂₀ and X is a halide (e.g., Cl or Br)). Suitable ligands are described, for example, in U.S. Pat. Nos. 11,072,812; 11,028,424; 10,618,907; and 10,101,332; incorporated by reference in their entireties. In certain embodiments, X of formula (I) is a methylsulfonamide or trifluoromethylsulfonamide, rather than a halide; such an embodiment results in an exchangeable ligand that reversibly binds to a modified dehalogenase (e.g., HALOTAG). Such ligands are described in, for example, Kompa et al. J. Am. Chem. Soc. 2023, 145, 5, 3075-3083; incorporated by reference in its entirety.

[0142] In some embodiments, R is one or more functional groups (such as a fluorophore, biotin, luminophore, or a fluorogenic or luminogenic molecule). Exemplary functional groups for use in the invention include, but are not limited to, an amino acid, protein, e.g., enzyme, antibody or other immunogenic protein, a radionuclide, a nucleic acid molecule, a drug, a lipid, biotin, avidin, streptavidin, a magnetic bead, a solid support, an electron opaque molecule, chromophore, MRI contrast agent, a dye, e.g., a xanthene dye, a calcium sensitive dye, e.g., 1-[2-amino-5-(2,7-dichloro-6-hydroxy-3-oxy-9-xanthenyl)-phenoxy]-2-(2′-am-ino-5′-methylphenoxy) ethane-N,N,N′,N′-tetraacetic acid (Fluo-3), a sodium sensitive dye, e.g., 1,3-benzenedicarboxylic acid, 4,4′-[1,4,10,13-tetraoxa-7,16-diazacyclooctadecane-7,16-diylbis(5-methoxy- -6,2-benzofurandiyl)]bis (PBFI), a NO sensitive dye, e.g., 4-amino-5-methylamino-2′,7′-difluorescein, or other fluorophore. In one embodiment, the functional group is an immunogenic molecule, i.e., one which is bound by antibodies specific for that molecule.

[0143] In some embodiments, a ligand comprises a fluorescent functional group (R). Suitable fluorescent functional groups include, but are not limited to: stilbazolium derivatives (Marquesa et al. Mechanism-Based Strategy for Optimizing HaloTag Protein Labeling. ChemRxiv. Cambridge: Cambridge Open Engage; 2021; incorporated by reference in its entirety), xanthene derivatives (e.g., fluorescein, rhodamine, Oregon green, cosin, Texas red, etc.), cyanine derivatives (e.g., cyanine, indocarbocyanine, oxacarbocyanine, thiacarbocyanine, merocyanine, etc.), naphthalene derivatives (e.g., dansyl and prodan derivatives), oxadiazole derivatives (e.g., pyridyloxazole, nitrobenzoxadiazole, benzoxadiazole, etc.), pyrene derivatives (e.g., cascade blue), oxazine derivatives (e.g., Nile red, Nile blue, cresyl violet, oxazine 170, etc.), acridine derivatives (e.g., proflavin, acridine orange, acridine yellow, etc.), arylmethine derivatives (e.g., auramine, crystal violet, malachite green, etc.), tetrapyrrole derivatives (e.g., porphin, phtalocyanine, bilirubin, etc.), CF dye (Biotium), BODIPY (Invitrogen), ALEXA FLOUR (Invitrogen), DYLIGHT FLUOR (Thermo Scientific, Pierce), ATTO and TRACY (Sigma Aldrich), FluoProbes (Interchim), DY and MEGASTOKES (Dyomics), SULFO CY dyes (CYANDYE, LLC), SETAU AND SQUARE DYES (SETA BioMedicals), QUASAR and CAL FLUOR dyes (Biosearch Technologies), SURELIGHT DYES (APC, RPE, PerCP, Phycobilisomes) (Columbia Biosciences), APC, APCXL, RPE, BPE (Phyco-Biotech), autofluorescent proteins (e.g., YFP, RFP, mCherry, mKate), quantum dot nanocrystals, etc.

[0144] In some embodiments, a ligand comprises a fluorogenic functional group (R). A fluorogenic functional group is one that produces and enhanced fluorescent signal upon binding of the ligand to a target (e.g., binding of a haloalkane to a modified dehalogenase). By producing significantly increased fluorescence (e.g., 10×, 31×, 50×, 100×, 310×, 500×, 100×, or more) upon target engagement, the problem of background signal is alleviated. Exemplary fluorogenic dyes for use in embodiments herein include the JANELIA FLUOR family of fluorophores, such as:

[chemical structure]

[chemical structure]

(see, e.g., U.S. Pat. Nos. 9,933,417; 10,018,624; 10,161,932; and 10,495,632; each of which is incorporated by reference in their entireties). In some embodiments, exemplary conjugates of JANELIA FLUOR 549 and JANELIA FLUOR 646 with haloalkane ligands for modified dehalogenase (e.g., HALOTAG) are commercially available (Promega Corp.). The use and design of fluorogenic functional groups, dyes, probes, and ligands is described in, for example, Grimm et al. Nat Methods. 3117 October; 14 (10): 987-994; Wang et al. Nat Chem. 3120 February; 12 (2): 165-172; incorporated by reference in their entireties.

### B. Bioluminescent Substrates

[0145] In some embodiments, systems and methods herein comprise a luminescent complex that utilizes a luminophore to generate a detectable luminescent signal. In some embodiments, an appropriate luminophore is selected to pair with the luminescent complex.

[0146] In some embodiments, the systems and methods herein (comprising a bioluminescent complex and/or components thereof) utilize an imidazopyrazine luminophore substrate to generate bioluminescence. Such embodiments include those utilizing NANOLUC-based, NANOBIT-based, and NANOTRIP-based luminescent complexes. In some embodiments, the substrate is coelenterazine:

[chemical structure]

[0147] In some embodiments, the substrate is a coelenterazine derivative, such as, furimazine, furimazine analogs (e.g., fluorofurimazine) coelenterazine-n, coelenterazine-f, coelenterazine-h, coelenterazine-hcp, coelenterazine-cp, coelenterazine-c, coelenterazine-e, coelenterazine-fcp, bis-deoxycoelenterazine (“coelenterazine-hh”), coelenterazine-i, coelenterazine-icp, coelenterazine-v, and 2-methyl coelenterazine, in addition to those disclosed in WO 2003/040100; U.S. application Ser. No. 12/056,073 (paragraph [0086]); U.S. Pat. No. 8,669,103; U.S. Prov. App. No. 63/379,573; the disclosures of which are incorporated by reference herein in their entireties.

[0148] In some embodiments, the substrate is furimazine:

[chemical structure]

[0149] In some embodiments, the substrate is fluorofurimazine:

[chemical structure]

[0150] Suitable luminophores for the bioluminescent complexes used in the systems or methods herein will be understood. For example, firefly luciferin, with the structure:

[chemical structure]

is the luciferin found in many Lampyridae species and is the substrate of beetle luciferases. Latia luciferin, with the structure:

[chemical structure]

is from the freshwater snail Latia neritoides. Bacterial luciferin, with the structure:

[chemical structure]

finds use as a substrate for many bacterial luciferases. Coelenterazine, of the structure:

[chemical structure]

is found in radiolarians, ctenophores, cnidarians, squid, brittle stars, copepods, chaetognaths, fish, and shrimp and is the luminophore substrate for the luciferases of those organisms. Variants and derivatives of coelenterazine, such as furimazine and fluorofurimazine, find use in embodiments herein (e.g., with Oplophorus-derived bioluminescent complexes). Other luminophore substrates include those of dinoflagellates:

[chemical structure]

Pairing of appropriate bioluminescent proteins or complexes with luminophores is understood in the field.

### V. Methods

[0151] In some embodiments, provided herein are methods of detecting the presence of and/or quantifying the amount of dsRNA is a sample comprising: (a) contacting the sample with a sufficient concentration of a system described herein (e.g., fusions of dsRNA binding domains with a pair of components of a detectable complex) and any necessary substrates, ligands, cofactors, etc.; and (b) detecting and/or quantifying a signal produced by the detectable complex. In some embodiments, the amount of signal (e.g., intensity) is correlated to the amount of dsRNA in the sample. In some embodiments, the signal is compared to a signal from a control sample with a known concentration of dsRNA. In some embodiments, the signal is compared to an established value corresponding to a known concentration of dsRNA in a sample.

[0152] In some embodiments, the sample is a biological sample, an environmental sample, a pharmaceutical sample (e.g., containing an RNA (e.g., ssRNA) therapeutic), or any suitable sample type that may contain dsRNA (e.g., as a contaminant). In some embodiments, the sample comprises a therapeutic RNA and the method is performed as quality control testing to ensure a sufficiently low quantity of dsRNA in the sample.

### EXPERIMENTAL

### Example 1

### Split Bioluminescent Protein

[0153] Fusions of the PKR dsRNA binding domain with LgBiT and SmBiT (PKR-LgBIT and PKR-SmBIT) were expressed in E. Coli and purified with His tags. The proteins expressed and purified well. Experiments conducted during development of embodiments herein demonstrate that the PKR-LgBiT and PKR-SmBIT components (25 ng/ml each), when added to a sample comprising Poly(I:C) (a synthetic dsRNA analog), along with furimazine, were capable of sensitive (limit of detection <0.1 ng/ml) and rapid (1 hour assay time) dsRNA quantification in an easy to use (add-mix-read) assay format (FIG. 3). The optimal incubation time was determined to be 1 hour. The exemplary assay is quantitative with about 2 logs of linear range.

### Example 2

### Split Fluorescent Protein

[0154] Fusions of the PKR dsRNA binding domain with LgGFP and SmGFP (PKR-LgGFP and PKR-SmGFP) were prepared. Experiments conducted during development of embodiments herein demonstrate that the PKR-LgBiT and PKR-SmBiT components, when added to a sample comprising dsRNA and exposed to the excitation wavelength for the GFP, were capable of sensitive and rapid dsRNA quantification (FIG. 4).

### REFERENCES

[0155] The following references are herein incorporated by reference in their entireties.
[0156] Cheng et al. Visualizing double-stranded RNA distribution and dynamics in living cells by dsRNA binding-dependent fluorescence complementation. Virology. 2015 (PMID: 26351203).
[0157] Monsion et al. Efficient detection of long dsRNA in vitro and in vivo using the dsRNA binding domain from FHV B2 protein. Front Plant Sci. 2018. (PMID: 29449856)

1. A double-stranded RNA (dsRNA) detection system comprising:
(a) a first fusion of (i) a first dsRNA binding domain and (ii) a first component of a detectable complex; and
(b) a second fusion of (i) a second dsRNA binding domain and (ii) a second component of the detectable complex;
wherein the first and second components of the detectable complex exhibit low affinity for one another in the absence of facilitation through the binding of the first and second dsRNA binding domains to the dsRNA; and
wherein the first and second components of the detectable complex exhibit low affinity for one another in the absence of facilitation through the binding of the first and second dsRNA binding domains to the dsRNA.

2-10. (canceled)

11. The system of claim 1, wherein the first and second dsRNA binding domains each comprise dsRNA binding motifs having at least 70% sequence identity with SEQ ID NO: 3062 and SEQ ID NO: 3063.

12. The system of claim 11, wherein the first and second dsRNA binding domains each comprise dsRNA binding motifs of SEQ ID NO: 3062 and SEQ ID NO: 3063.

13. (canceled)

14. The system of claim 1, wherein the dsRNA binding domain comprises at least 70% sequence identity with SEQ ID NO: 3061.

15. The system of claim 14, wherein the dsRNA binding domain comprises SEQ ID NO: 3061.

16. The system of claim 1, wherein the detectable complex is capable of generating a signal that can be detected and correlated to the amount of dsRNA in a sample with the system.

17. (canceled)

18. The system of claim 16, wherein the signal comprises one or more of fluorescence, luminescence, enzymatic activity, and ligand binding.

19. The system of claim 1, wherein the first and second components of the detectable complex are fragments of a protein capable of generating a detectable signal, and wherein the detectable complex is capable of generating the detectable signal upon association of the first and second components of the detectable complex.

20-21. (canceled)

22. The system of claim 19, wherein the protein is a fluorescent protein selected from yellow fluorescent protein (YFP), green fluorescent protein (GFP), cyan fluorescent protein (CFP), red fluorescent protein (RFP), umbelliferone, fluorescein, fluorescein isothiocyanate, rhodamine, dichlorotriazinylamine fluorescein, cyanines, dansyl chloride, phycocyanin, and phycoerythrin.

23-24. (canceled)

25. The system of claim 19, wherein the detectable signal is enzymatic activity and the protein is selected from beta-lactamase, dihydrofolate reductase (DHFR), focal adhesion kinase (FAK), Gal4, and horseradish peroxidase.

26-29. (canceled)

30. The system of claim 19, wherein the protein is a luciferase selected from an Oplophorus luciferase, a firefly luciferase, a click beetle luciferase, a Renilla luciferase, cypridina luciferase, an Aequorin photoprotein, and an obelin photoprotein.

31-32. (canceled)

33. The system of claim 1, wherein the first component of the detectable complex comprises at least 70% sequence identity with SEQ ID NO: 3043 and the first component of the detectable complex comprises at least 70% sequence identity with SEQ ID NO: 3051.

34. The system of claim 1, wherein the first component of the detectable complex comprises at least 70% sequence identity with SEQ ID NO: 3044 and the first component of the detectable complex comprises at least 70% sequence identity with SEQ ID NO: 3052.

35. The system of claim 1, wherein the first component of the detectable complex comprises at least 70% sequence identity with SEQ ID NO: 3045 and the first component of the detectable complex comprises at least 70% sequence identity with SEQ ID NO: 3053.

36. The system of claim 30, further comprising a substrate for the luciferase.

37. The system of claim 19, wherein the detectable signal is ligand binding.

38. The system of claim 1, wherein the detectable complex is a modified dehalogenase complex and wherein the first and second components of the modified dehalogenase complex comprise at least 70% sequence identity with first and second fragments of SEQ ID NO: 1.

39. (canceled)

40. The system of claim 38, further comprising a haloalkyl ligand for the modified dehalogenase.

41-42. (canceled)

43. A double-stranded RNA (dsRNA) detection system comprising:
(a) a first fusion of (i) a PKR-derived dsRNA binding domain sequence, and (ii) a peptide component of a bioluminescent complex; and
(b) a second fusion of (i) the PKR-derived dsRNA binding domain sequence, and (ii) a polypeptide component of a bioluminescent complex;
wherein upon binding of the PKR-derived dsRNA binding domain sequences to a dsRNA a luminescent complex is formed by structural complementation of the peptide component and the polypeptide component; and
wherein a luminescent signal produced by the luminescent complex in the presence of the dsRNA and a substrate for the luminescent complex is enhanced when compared to a luminescent signal produced in the absence of the dsRNA.

44-55. (canceled)

56. A method of detecting dsRNA in a sample, the method comprising contacting the sample with a system of claim 1 and detecting a signal from the detectable complex, wherein the amount of signal detected correlates with the amount of dsRNA in the sample.

57. (canceled)

The application's sequence listing, which the Patent Office published only in electronic form, follows.

SEQUENCE LISTING (3070 sequences)

SEQ ID NO: 1 - protein, 297 aa, Synthetic construct
MAEIGTGFPFDPHYVEVLGERMHYVDVGPRDGTPVLFLHGNPTSSYVWRNIIPHVAPTHRCIAPDLIGMGKSDKPDLGYFFDDHVRFMDAFIEALGLEEVVLVIHDWGSALGFHWAKRNPERVKGIAFMEFIRPIPTWDEWPEFARETFQAFRTTDVGRKLIIDQNVFIEGTLPMGVVRPLTEVEMDHYREPFLNPVDREPLWRFPNELPIAGEPANIVALVEEYMDWLHQSPVPKLLFWGTPGVLIPPAEAARLAKSLPNCKAVDIGPGLNLLQEDNPDLIGSEIARWLSTLEISG

SEQ ID NO: 2 - protein, 292 aa, Synthetic construct
TGFPFDPHYVEVLGERMHYVDVGPRDGTPVLFLHGNPTSSYVWRNIIPHVAPTHRCIAPDLIGMGKSDKPDLGYFFDDHVRFMDAFIEALGLEEVVLVIHDWGSALGFHWAKRNPERVKGIAFMEFIRPIPTWDEWPEFARETFQAFRTTDVGRKLIIDQNVFIEGTLPMGVVRPLTEVEMDHYREPFLNPVDREPLWRFPNELPIAGEPANIVALVEEYMDWLHQSPVPKLLFWGTPGVLIPPAEAARLAKSLPNCKAVDIGPGLNLLQEDNPDLIGSEIARWLSTLEISG

SEQ ID NO: 3 - protein, 5 aa, Synthetic construct
MAEIG

SEQ ID NO: 4 - protein, 291 aa, Synthetic construct
GFPFDPHYVEVLGERMHYVDVGPRDGTPVLFLHGNPTSSYVWRNIIPHVAPTHRCIAPDLIGMGKSDKPDLGYFFDDHVRFMDAFIEALGLEEVVLVIHDWGSALGFHWAKRNPERVKGIAFMEFIRPIPTWDEWPEFARETFQAFRTTDVGRKLIIDQNVFIEGTLPMGVVRPLTEVEMDHYREPFLNPVDREPLWRFPNELPIAGEPANIVALVEEYMDWLHQSPVPKLLFWGTPGVLIPPAEAARLAKSLPNCKAVDIGPGLNLLQEDNPDLIGSEIARWLSTLEISG

SEQ ID NO: 5 - protein, 6 aa, Synthetic construct
MAEIGT

SEQ ID NO: 6 - protein, 290 aa, Synthetic construct
FPFDPHYVEVLGERMHYVDVGPRDGTPVLFLHGNPTSSYVWRNIIPHVAPTHRCIAPDLIGMGKSDKPDLGYFFDDHVRFMDAFIEALGLEEVVLVIHDWGSALGFHWAKRNPERVKGIAFMEFIRPIPTWDEWPEFARETFQAFRTTDVGRKLIIDQNVFIEGTLPMGVVRPLTEVEMDHYREPFLNPVDREPLWRFPNELPIAGEPANIVALVEEYMDWLHQSPVPKLLFWGTPGVLIPPAEAARLAKSLPNCKAVDIGPGLNLLQEDNPDLIGSEIARWLSTLEISG

SEQ ID NO: 7 - protein, 7 aa, Synthetic construct
MAEIGTG

SEQ ID NO: 8 - protein, 289 aa, Synthetic construct
PFDPHYVEVLGERMHYVDVGPRDGTPVLFLHGNPTSSYVWRNIIPHVAPTHRCIAPDLIGMGKSDKPDLGYFFDDHVRFMDAFIEALGLEEVVLVIHDWGSALGFHWAKRNPERVKGIAFMEFIRPIPTWDEWPEFARETFQAFRTTDVGRKLIIDQNVFIEGTLPMGVVRPLTEVEMDHYREPFLNPVDREPLWRFPNELPIAGEPANIVALVEEYMDWLHQSPVPKLLFWGTPGVLIPPAEAARLAKSLPNCKAVDIGPGLNLLQEDNPDLIGSEIARWLSTLEISG

SEQ ID NO: 9 - protein, 8 aa, Synthetic construct
MAEIGTGF

SEQ ID NO: 10 - protein, 288 aa, Synthetic construct
FDPHYVEVLGERMHYVDVGPRDGTPVLFLHGNPTSSYVWRNIIPHVAPTHRCIAPDLIGMGKSDKPDLGYFFDDHVRFMDAFIEALGLEEVVLVIHDWGSALGFHWAKRNPERVKGIAFMEFIRPIPTWDEWPEFARETFQAFRTTDVGRKLIIDQNVFIEGTLPMGVVRPLTEVEMDHYREPFLNPVDREPLWRFPNELPIAGEPANIVALVEEYMDWLHQSPVPKLLFWGTPGVLIPPAEAARLAKSLPNCKAVDIGPGLNLLQEDNPDLIGSEIARWLSTLEISG

SEQ ID NO: 11 - protein, 9 aa, Synthetic construct
MAEIGTGFP

SEQ ID NO: 12 - protein, 287 aa, Synthetic construct
DPHYVEVLGERMHYVDVGPRDGTPVLFLHGNPTSSYVWRNIIPHVAPTHRCIAPDLIGMGKSDKPDLGYFFDDHVRFMDAFIEALGLEEVVLVIHDWGSALGFHWAKRNPERVKGIAFMEFIRPIPTWDEWPEFARETFQAFRTTDVGRKLIIDQNVFIEGTLPMGVVRPLTEVEMDHYREPFLNPVDREPLWRFPNELPIAGEPANIVALVEEYMDWLHQSPVPKLLFWGTPGVLIPPAEAARLAKSLPNCKAVDIGPGLNLLQEDNPDLIGSEIARWLSTLEISG

SEQ ID NO: 13 - protein, 10 aa, Synthetic construct
MAEIGTGFPF

SEQ ID NO: 14 - protein, 286 aa, Synthetic construct
PHYVEVLGERMHYVDVGPRDGTPVLFLHGNPTSSYVWRNIIPHVAPTHRCIAPDLIGMGKSDKPDLGYFFDDHVRFMDAFIEALGLEEVVLVIHDWGSALGFHWAKRNPERVKGIAFMEFIRPIPTWDEWPEFARETFQAFRTTDVGRKLIIDQNVFIEGTLPMGVVRPLTEVEMDHYREPFLNPVDREPLWRFPNELPIAGEPANIVALVEEYMDWLHQSPVPKLLFWGTPGVLIPPAEAARLAKSLPNCKAVDIGPGLNLLQEDNPDLIGSEIARWLSTLEISG

SEQ ID NO: 15 - protein, 11 aa, Synthetic construct
MAEIGTGFPFD

SEQ ID NO: 16 - protein, 285 aa, Synthetic construct
HYVEVLGERMHYVDVGPRDGTPVLFLHGNPTSSYVWRNIIPHVAPTHRCIAPDLIGMGKSDKPDLGYFFDDHVRFMDAFIEALGLEEVVLVIHDWGSALGFHWAKRNPERVKGIAFMEFIRPIPTWDEWPEFARETFQAFRTTDVGRKLIIDQNVFIEGTLPMGVVRPLTEVEMDHYREPFLNPVDREPLWRFPNELPIAGEPANIVALVEEYMDWLHQSPVPKLLFWGTPGVLIPPAEAARLAKSLPNCKAVDIGPGLNLLQEDNPDLIGSEIARWLSTLEISG

SEQ ID NO: 17 - protein, 12 aa, Synthetic construct
MAEIGTGFPFDP

SEQ ID NO: 18 - protein, 284 aa, Synthetic construct
YVEVLGERMHYVDVGPRDGTPVLFLHGNPTSSYVWRNIIPHVAPTHRCIAPDLIGMGKSDKPDLGYFFDDHVRFMDAFIEALGLEEVVLVIHDWGSALGFHWAKRNPERVKGIAFMEFIRPIPTWDEWPEFARETFQAFRTTDVGRKLIIDQNVFIEGTLPMGVVRPLTEVEMDHYREPFLNPVDREPLWRFPNELPIAGEPANIVALVEEYMDWLHQSPVPKLLFWGTPGVLIPPAEAARLAKSLPNCKAVDIGPGLNLLQEDNPDLIGSEIARWLSTLEISG

SEQ ID NO: 19 - protein, 13 aa, Synthetic construct
MAEIGTGFPFDPH

SEQ ID NO: 20 - protein, 283 aa, Synthetic construct
VEVLGERMHYVDVGPRDGTPVLFLHGNPTSSYVWRNIIPHVAPTHRCIAPDLIGMGKSDKPDLGYFFDDHVRFMDAFIEALGLEEVVLVIHDWGSALGFHWAKRNPERVKGIAFMEFIRPIPTWDEWPEFARETFQAFRTTDVGRKLIIDQNVFIEGTLPMGVVRPLTEVEMDHYREPFLNPVDREPLWRFPNELPIAGEPANIVALVEEYMDWLHQSPVPKLLFWGTPGVLIPPAEAARLAKSLPNCKAVDIGPGLNLLQEDNPDLIGSEIARWLSTLEISG

SEQ ID NO: 21 - protein, 14 aa, Synthetic construct
MAEIGTGFPFDPHY

SEQ ID NO: 22 - protein, 282 aa, Synthetic construct
EVLGERMHYVDVGPRDGTPVLFLHGNPTSSYVWRNIIPHVAPTHRCIAPDLIGMGKSDKPDLGYFFDDHVRFMDAFIEALGLEEVVLVIHDWGSALGFHWAKRNPERVKGIAFMEFIRPIPTWDEWPEFARETFQAFRTTDVGRKLIIDQNVFIEGTLPMGVVRPLTEVEMDHYREPFLNPVDREPLWRFPNELPIAGEPANIVALVEEYMDWLHQSPVPKLLFWGTPGVLIPPAEAARLAKSLPNCKAVDIGPGLNLLQEDNPDLIGSEIARWLSTLEISG

SEQ ID NO: 23 - protein, 15 aa, Synthetic construct
MAEIGTGFPFDPHYV

SEQ ID NO: 24 - protein, 281 aa, Synthetic construct
VLGERMHYVDVGPRDGTPVLFLHGNPTSSYVWRNIIPHVAPTHRCIAPDLIGMGKSDKPDLGYFFDDHVRFMDAFIEALGLEEVVLVIHDWGSALGFHWAKRNPERVKGIAFMEFIRPIPTWDEWPEFARETFQAFRTTDVGRKLIIDQNVFIEGTLPMGVVRPLTEVEMDHYREPFLNPVDREPLWRFPNELPIAGEPANIVALVEEYMDWLHQSPVPKLLFWGTPGVLIPPAEAARLAKSLPNCKAVDIGPGLNLLQEDNPDLIGSEIARWLSTLEISG

SEQ ID NO: 25 - protein, 16 aa, Synthetic construct
MAEIGTGFPFDPHYVE

SEQ ID NO: 26 - protein, 280 aa, Synthetic construct
LGERMHYVDVGPRDGTPVLFLHGNPTSSYVWRNIIPHVAPTHRCIAPDLIGMGKSDKPDLGYFFDDHVRFMDAFIEALGLEEVVLVIHDWGSALGFHWAKRNPERVKGIAFMEFIRPIPTWDEWPEFARETFQAFRTTDVGRKLIIDQNVFIEGTLPMGVVRPLTEVEMDHYREPFLNPVDREPLWRFPNELPIAGEPANIVALVEEYMDWLHQSPVPKLLFWGTPGVLIPPAEAARLAKSLPNCKAVDIGPGLNLLQEDNPDLIGSEIARWLSTLEISG

SEQ ID NO: 27 - protein, 17 aa, Synthetic construct
MAEIGTGFPFDPHYVEV

SEQ ID NO: 28 - protein, 279 aa, Synthetic construct
GERMHYVDVGPRDGTPVLFLHGNPTSSYVWRNIIPHVAPTHRCIAPDLIGMGKSDKPDLGYFFDDHVRFMDAFIEALGLEEVVLVIHDWGSALGFHWAKRNPERVKGIAFMEFIRPIPTWDEWPEFARETFQAFRTTDVGRKLIIDQNVFIEGTLPMGVVRPLTEVEMDHYREPFLNPVDREPLWRFPNELPIAGEPANIVALVEEYMDWLHQSPVPKLLFWGTPGVLIPPAEAARLAKSLPNCKAVDIGPGLNLLQEDNPDLIGSEIARWLSTLEISG

SEQ ID NO: 29 - protein, 18 aa, Synthetic construct
MAEIGTGFPFDPHYVEVL

SEQ ID NO: 30 - protein, 278 aa, Synthetic construct
ERMHYVDVGPRDGTPVLFLHGNPTSSYVWRNIIPHVAPTHRCIAPDLIGMGKSDKPDLGYFFDDHVRFMDAFIEALGLEEVVLVIHDWGSALGFHWAKRNPERVKGIAFMEFIRPIPTWDEWPEFARETFQAFRTTDVGRKLIIDQNVFIEGTLPMGVVRPLTEVEMDHYREPFLNPVDREPLWRFPNELPIAGEPANIVALVEEYMDWLHQSPVPKLLFWGTPGVLIPPAEAARLAKSLPNCKAVDIGPGLNLLQEDNPDLIGSEIARWLSTLEISG

SEQ ID NO: 31 - protein, 19 aa, Synthetic construct
MAEIGTGFPFDPHYVEVLG

SEQ ID NO: 32 - protein, 277 aa, Synthetic construct
RMHYVDVGPRDGTPVLFLHGNPTSSYVWRNIIPHVAPTHRCIAPDLIGMGKSDKPDLGYFFDDHVRFMDAFIEALGLEEVVLVIHDWGSALGFHWAKRNPERVKGIAFMEFIRPIPTWDEWPEFARETFQAFRTTDVGRKLIIDQNVFIEGTLPMGVVRPLTEVEMDHYREPFLNPVDREPLWRFPNELPIAGEPANIVALVEEYMDWLHQSPVPKLLFWGTPGVLIPPAEAARLAKSLPNCKAVDIGPGLNLLQEDNPDLIGSEIARWLSTLEISG

SEQ ID NO: 33 - protein, 20 aa, Synthetic construct
MAEIGTGFPFDPHYVEVLGE

SEQ ID NO: 34 - protein, 276 aa, Synthetic construct
MHYVDVGPRDGTPVLFLHGNPTSSYVWRNIIPHVAPTHRCIAPDLIGMGKSDKPDLGYFFDDHVRFMDAFIEALGLEEVVLVIHDWGSALGFHWAKRNPERVKGIAFMEFIRPIPTWDEWPEFARETFQAFRTTDVGRKLIIDQNVFIEGTLPMGVVRPLTEVEMDHYREPFLNPVDREPLWRFPNELPIAGEPANIVALVEEYMDWLHQSPVPKLLFWGTPGVLIPPAEAARLAKSLPNCKAVDIGPGLNLLQEDNPDLIGSEIARWLSTLEISG

SEQ ID NO: 35 - protein, 21 aa, Synthetic construct
MAEIGTGFPFDPHYVEVLGER

SEQ ID NO: 36 - protein, 275 aa, Synthetic construct
HYVDVGPRDGTPVLFLHGNPTSSYVWRNIIPHVAPTHRCIAPDLIGMGKSDKPDLGYFFDDHVRFMDAFIEALGLEEVVLVIHDWGSALGFHWAKRNPERVKGIAFMEFIRPIPTWDEWPEFARETFQAFRTTDVGRKLIIDQNVFIEGTLPMGVVRPLTEVEMDHYREPFLNPVDREPLWRFPNELPIAGEPANIVALVEEYMDWLHQSPVPKLLFWGTPGVLIPPAEAARLAKSLPNCKAVDIGPGLNLLQEDNPDLIGSEIARWLSTLEISG

SEQ ID NO: 37 - protein, 22 aa, Synthetic construct
MAEIGTGFPFDPHYVEVLGERM

SEQ ID NO: 38 - protein, 274 aa, Synthetic construct
YVDVGPRDGTPVLFLHGNPTSSYVWRNIIPHVAPTHRCIAPDLIGMGKSDKPDLGYFFDDHVRFMDAFIEALGLEEVVLVIHDWGSALGFHWAKRNPERVKGIAFMEFIRPIPTWDEWPEFARETFQAFRTTDVGRKLIIDQNVFIEGTLPMGVVRPLTEVEMDHYREPFLNPVDREPLWRFPNELPIAGEPANIVALVEEYMDWLHQSPVPKLLFWGTPGVLIPPAEAARLAKSLPNCKAVDIGPGLNLLQEDNPDLIGSEIARWLSTLEISG

SEQ ID NO: 39 - protein, 23 aa, Synthetic construct
MAEIGTGFPFDPHYVEVLGERMH

SEQ ID NO: 40 - protein, 273 aa, Synthetic construct
VDVGPRDGTPVLFLHGNPTSSYVWRNIIPHVAPTHRCIAPDLIGMGKSDKPDLGYFFDDHVRFMDAFIEALGLEEVVLVIHDWGSALGFHWAKRNPERVKGIAFMEFIRPIPTWDEWPEFARETFQAFRTTDVGRKLIIDQNVFIEGTLPMGVVRPLTEVEMDHYREPFLNPVDREPLWRFPNELPIAGEPANIVALVEEYMDWLHQSPVPKLLFWGTPGVLIPPAEAARLAKSLPNCKAVDIGPGLNLLQEDNPDLIGSEIARWLSTLEISG

SEQ ID NO: 41 - protein, 24 aa, Synthetic construct
MAEIGTGFPFDPHYVEVLGERMHY

SEQ ID NO: 42 - protein, 272 aa, Synthetic construct
DVGPRDGTPVLFLHGNPTSSYVWRNIIPHVAPTHRCIAPDLIGMGKSDKPDLGYFFDDHVRFMDAFIEALGLEEVVLVIHDWGSALGFHWAKRNPERVKGIAFMEFIRPIPTWDEWPEFARETFQAFRTTDVGRKLIIDQNVFIEGTLPMGVVRPLTEVEMDHYREPFLNPVDREPLWRFPNELPIAGEPANIVALVEEYMDWLHQSPVPKLLFWGTPGVLIPPAEAARLAKSLPNCKAVDIGPGLNLLQEDNPDLIGSEIARWLSTLEISG

SEQ ID NO: 43 - protein, 25 aa, Synthetic construct
MAEIGTGFPFDPHYVEVLGERMHYV

SEQ ID NO: 44 - protein, 271 aa, Synthetic construct
VGPRDGTPVLFLHGNPTSSYVWRNIIPHVAPTHRCIAPDLIGMGKSDKPDLGYFFDDHVRFMDAFIEALGLEEVVLVIHDWGSALGFHWAKRNPERVKGIAFMEFIRPIPTWDEWPEFARETFQAFRTTDVGRKLIIDQNVFIEGTLPMGVVRPLTEVEMDHYREPFLNPVDREPLWRFPNELPIAGEPANIVALVEEYMDWLHQSPVPKLLFWGTPGVLIPPAEAARLAKSLPNCKAVDIGPGLNLLQEDNPDLIGSEIARWLSTLEISG

SEQ ID NO: 45 - protein, 26 aa, Synthetic construct
MAEIGTGFPFDPHYVEVLGERMHYVD

SEQ ID NO: 46 - protein, 270 aa, Synthetic construct
GPRDGTPVLFLHGNPTSSYVWRNIIPHVAPTHRCIAPDLIGMGKSDKPDLGYFFDDHVRFMDAFIEALGLEEVVLVIHDWGSALGFHWAKRNPERVKGIAFMEFIRPIPTWDEWPEFARETFQAFRTTDVGRKLIIDQNVFIEGTLPMGVVRPLTEVEMDHYREPFLNPVDREPLWRFPNELPIAGEPANIVALVEEYMDWLHQSPVPKLLFWGTPGVLIPPAEAARLAKSLPNCKAVDIGPGLNLLQEDNPDLIGSEIARWLSTLEISG

SEQ ID NO: 47 - protein, 27 aa, Synthetic construct
MAEIGTGFPFDPHYVEVLGERMHYVDV

SEQ ID NO: 48 - protein, 269 aa, Synthetic construct
PRDGTPVLFLHGNPTSSYVWRNIIPHVAPTHRCIAPDLIGMGKSDKPDLGYFFDDHVRFMDAFIEALGLEEVVLVIHDWGSALGFHWAKRNPERVKGIAFMEFIRPIPTWDEWPEFARETFQAFRTTDVGRKLIIDQNVFIEGTLPMGVVRPLTEVEMDHYREPFLNPVDREPLWRFPNELPIAGEPANIVALVEEYMDWLHQSPVPKLLFWGTPGVLIPPAEAARLAKSLPNCKAVDIGPGLNLLQEDNPDLIGSEIARWLSTLEISG

SEQ ID NO: 49 - protein, 28 aa, Synthetic construct
MAEIGTGFPFDPHYVEVLGERMHYVDVG

SEQ ID NO: 50 - protein, 268 aa, Synthetic construct
RDGTPVLFLHGNPTSSYVWRNIIPHVAPTHRCIAPDLIGMGKSDKPDLGYFFDDHVRFMDAFIEALGLEEVVLVIHDWGSALGFHWAKRNPERVKGIAFMEFIRPIPTWDEWPEFARETFQAFRTTDVGRKLIIDQNVFIEGTLPMGVVRPLTEVEMDHYREPFLNPVDREPLWRFPNELPIAGEPANIVALVEEYMDWLHQSPVPKLLFWGTPGVLIPPAEAARLAKSLPNCKAVDIGPGLNLLQEDNPDLIGSEIARWLSTLEISG

SEQ ID NO: 51 - protein, 29 aa, Synthetic construct
MAEIGTGFPFDPHYVEVLGERMHYVDVGP

SEQ ID NO: 52 - protein, 267 aa, Synthetic construct
DGTPVLFLHGNPTSSYVWRNIIPHVAPTHRCIAPDLIGMGKSDKPDLGYFFDDHVRFMDAFIEALGLEEVVLVIHDWGSALGFHWAKRNPERVKGIAFMEFIRPIPTWDEWPEFARETFQAFRTTDVGRKLIIDQNVFIEGTLPMGVVRPLTEVEMDHYREPFLNPVDREPLWRFPNELPIAGEPANIVALVEEYMDWLHQSPVPKLLFWGTPGVLIPPAEAARLAKSLPNCKAVDIGPGLNLLQEDNPDLIGSEIARWLSTLEISG

SEQ ID NO: 53 - protein, 30 aa, Synthetic construct
MAEIGTGFPFDPHYVEVLGERMHYVDVGPR

SEQ ID NO: 54 - protein, 266 aa, Synthetic construct
GTPVLFLHGNPTSSYVWRNIIPHVAPTHRCIAPDLIGMGKSDKPDLGYFFDDHVRFMDAFIEALGLEEVVLVIHDWGSALGFHWAKRNPERVKGIAFMEFIRPIPTWDEWPEFARETFQAFRTTDVGRKLIIDQNVFIEGTLPMGVVRPLTEVEMDHYREPFLNPVDREPLWRFPNELPIAGEPANIVALVEEYMDWLHQSPVPKLLFWGTPGVLIPPAEAARLAKSLPNCKAVDIGPGLNLLQEDNPDLIGSEIARWLSTLEISG

SEQ ID NO: 55 - protein, 31 aa, Synthetic construct
MAEIGTGFPFDPHYVEVLGERMHYVDVGPRD

SEQ ID NO: 56 - protein, 265 aa, Synthetic construct
TPVLFLHGNPTSSYVWRNIIPHVAPTHRCIAPDLIGMGKSDKPDLGYFFDDHVRFMDAFIEALGLEEVVLVIHDWGSALGFHWAKRNPERVKGIAFMEFIRPIPTWDEWPEFARETFQAFRTTDVGRKLIIDQNVFIEGTLPMGVVRPLTEVEMDHYREPFLNPVDREPLWRFPNELPIAGEPANIVALVEEYMDWLHQSPVPKLLFWGTPGVLIPPAEAARLAKSLPNCKAVDIGPGLNLLQEDNPDLIGSEIARWLSTLEISG

SEQ ID NO: 57 - protein, 32 aa, Synthetic construct
MAEIGTGFPFDPHYVEVLGERMHYVDVGPRDG

SEQ ID NO: 58 - protein, 264 aa, Synthetic construct
PVLFLHGNPTSSYVWRNIIPHVAPTHRCIAPDLIGMGKSDKPDLGYFFDDHVRFMDAFIEALGLEEVVLVIHDWGSALGFHWAKRNPERVKGIAFMEFIRPIPTWDEWPEFARETFQAFRTTDVGRKLIIDQNVFIEGTLPMGVVRPLTEVEMDHYREPFLNPVDREPLWRFPNELPIAGEPANIVALVEEYMDWLHQSPVPKLLFWGTPGVLIPPAEAARLAKSLPNCKAVDIGPGLNLLQEDNPDLIGSEIARWLSTLEISG

SEQ ID NO: 59 - protein, 33 aa, Synthetic construct
MAEIGTGFPFDPHYVEVLGERMHYVDVGPRDGT

SEQ ID NO: 60 - protein, 263 aa, Synthetic construct
VLFLHGNPTSSYVWRNIIPHVAPTHRCIAPDLIGMGKSDKPDLGYFFDDHVRFMDAFIEALGLEEVVLVIHDWGSALGFHWAKRNPERVKGIAFMEFIRPIPTWDEWPEFARETFQAFRTTDVGRKLIIDQNVFIEGTLPMGVVRPLTEVEMDHYREPFLNPVDREPLWRFPNELPIAGEPANIVALVEEYMDWLHQSPVPKLLFWGTPGVLIPPAEAARLAKSLPNCKAVDIGPGLNLLQEDNPDLIGSEIARWLSTLEISG

SEQ ID NO: 61 - protein, 34 aa, Synthetic construct
MAEIGTGFPFDPHYVEVLGERMHYVDVGPRDGTP

SEQ ID NO: 62 - protein, 262 aa, Synthetic construct
LFLHGNPTSSYVWRNIIPHVAPTHRCIAPDLIGMGKSDKPDLGYFFDDHVRFMDAFIEALGLEEVVLVIHDWGSALGFHWAKRNPERVKGIAFMEFIRPIPTWDEWPEFARETFQAFRTTDVGRKLIIDQNVFIEGTLPMGVVRPLTEVEMDHYREPFLNPVDREPLWRFPNELPIAGEPANIVALVEEYMDWLHQSPVPKLLFWGTPGVLIPPAEAARLAKSLPNCKAVDIGPGLNLLQEDNPDLIGSEIARWLSTLEISG

SEQ ID NO: 63 - protein, 35 aa, Synthetic construct
MAEIGTGFPFDPHYVEVLGERMHYVDVGPRDGTPV

SEQ ID NO: 64 - protein, 261 aa, Synthetic construct
FLHGNPTSSYVWRNIIPHVAPTHRCIAPDLIGMGKSDKPDLGYFFDDHVRFMDAFIEALGLEEVVLVIHDWGSALGFHWAKRNPERVKGIAFMEFIRPIPTWDEWPEFARETFQAFRTTDVGRKLIIDQNVFIEGTLPMGVVRPLTEVEMDHYREPFLNPVDREPLWRFPNELPIAGEPANIVALVEEYMDWLHQSPVPKLLFWGTPGVLIPPAEAARLAKSLPNCKAVDIGPGLNLLQEDNPDLIGSEIARWLSTLEISG

SEQ ID NO: 65 - protein, 36 aa, Synthetic construct
MAEIGTGFPFDPHYVEVLGERMHYVDVGPRDGTPVL

SEQ ID NO: 66 - protein, 260 aa, Synthetic construct
LHGNPTSSYVWRNIIPHVAPTHRCIAPDLIGMGKSDKPDLGYFFDDHVRFMDAFIEALGLEEVVLVIHDWGSALGFHWAKRNPERVKGIAFMEFIRPIPTWDEWPEFARETFQAFRTTDVGRKLIIDQNVFIEGTLPMGVVRPLTEVEMDHYREPFLNPVDREPLWRFPNELPIAGEPANIVALVEEYMDWLHQSPVPKLLFWGTPGVLIPPAEAARLAKSLPNCKAVDIGPGLNLLQEDNPDLIGSEIARWLSTLEISG

SEQ ID NO: 67 - protein, 37 aa, Synthetic construct
MAEIGTGFPFDPHYVEVLGERMHYVDVGPRDGTPVLF

SEQ ID NO: 68 - protein, 259 aa, Synthetic construct
HGNPTSSYVWRNIIPHVAPTHRCIAPDLIGMGKSDKPDLGYFFDDHVRFMDAFIEALGLEEVVLVIHDWGSALGFHWAKRNPERVKGIAFMEFIRPIPTWDEWPEFARETFQAFRTTDVGRKLIIDQNVFIEGTLPMGVVRPLTEVEMDHYREPFLNPVDREPLWRFPNELPIAGEPANIVALVEEYMDWLHQSPVPKLLFWGTPGVLIPPAEAARLAKSLPNCKAVDIGPGLNLLQEDNPDLIGSEIARWLSTLEISG

SEQ ID NO: 69 - protein, 38 aa, Synthetic construct
MAEIGTGFPFDPHYVEVLGERMHYVDVGPRDGTPVLFL

SEQ ID NO: 70 - protein, 258 aa, Synthetic construct
GNPTSSYVWRNIIPHVAPTHRCIAPDLIGMGKSDKPDLGYFFDDHVRFMDAFIEALGLEEVVLVIHDWGSALGFHWAKRNPERVKGIAFMEFIRPIPTWDEWPEFARETFQAFRTTDVGRKLIIDQNVFIEGTLPMGVVRPLTEVEMDHYREPFLNPVDREPLWRFPNELPIAGEPANIVALVEEYMDWLHQSPVPKLLFWGTPGVLIPPAEAARLAKSLPNCKAVDIGPGLNLLQEDNPDLIGSEIARWLSTLEISG

SEQ ID NO: 71 - protein, 39 aa, Synthetic construct
MAEIGTGFPFDPHYVEVLGERMHYVDVGPRDGTPVLFLH

SEQ ID NO: 72 - protein, 257 aa, Synthetic construct
NPTSSYVWRNIIPHVAPTHRCIAPDLIGMGKSDKPDLGYFFDDHVRFMDAFIEALGLEEVVLVIHDWGSALGFHWAKRNPERVKGIAFMEFIRPIPTWDEWPEFARETFQAFRTTDVGRKLIIDQNVFIEGTLPMGVVRPLTEVEMDHYREPFLNPVDREPLWRFPNELPIAGEPANIVALVEEYMDWLHQSPVPKLLFWGTPGVLIPPAEAARLAKSLPNCKAVDIGPGLNLLQEDNPDLIGSEIARWLSTLEISG

SEQ ID NO: 73 - protein, 40 aa, Synthetic construct
MAEIGTGFPFDPHYVEVLGERMHYVDVGPRDGTPVLFLHG

SEQ ID NO: 74 - protein, 256 aa, Synthetic construct
PTSSYVWRNIIPHVAPTHRCIAPDLIGMGKSDKPDLGYFFDDHVRFMDAFIEALGLEEVVLVIHDWGSALGFHWAKRNPERVKGIAFMEFIRPIPTWDEWPEFARETFQAFRTTDVGRKLIIDQNVFIEGTLPMGVVRPLTEVEMDHYREPFLNPVDREPLWRFPNELPIAGEPANIVALVEEYMDWLHQSPVPKLLFWGTPGVLIPPAEAARLAKSLPNCKAVDIGPGLNLLQEDNPDLIGSEIARWLSTLEISG

SEQ ID NO: 75 - protein, 41 aa, Synthetic construct
MAEIGTGFPFDPHYVEVLGERMHYVDVGPRDGTPVLFLHGN

SEQ ID NO: 76 - protein, 255 aa, Synthetic construct
TSSYVWRNIIPHVAPTHRCIAPDLIGMGKSDKPDLGYFFDDHVRFMDAFIEALGLEEVVLVIHDWGSALGFHWAKRNPERVKGIAFMEFIRPIPTWDEWPEFARETFQAFRTTDVGRKLIIDQNVFIEGTLPMGVVRPLTEVEMDHYREPFLNPVDREPLWRFPNELPIAGEPANIVALVEEYMDWLHQSPVPKLLFWGTPGVLIPPAEAARLAKSLPNCKAVDIGPGLNLLQEDNPDLIGSEIARWLSTLEISG

SEQ ID NO: 77 - protein, 42 aa, Synthetic construct
MAEIGTGFPFDPHYVEVLGERMHYVDVGPRDGTPVLFLHGNP

SEQ ID NO: 78 - protein, 254 aa, Synthetic construct
SSYVWRNIIPHVAPTHRCIAPDLIGMGKSDKPDLGYFFDDHVRFMDAFIEALGLEEVVLVIHDWGSALGFHWAKRNPERVKGIAFMEFIRPIPTWDEWPEFARETFQAFRTTDVGRKLIIDQNVFIEGTLPMGVVRPLTEVEMDHYREPFLNPVDREPLWRFPNELPIAGEPANIVALVEEYMDWLHQSPVPKLLFWGTPGVLIPPAEAARLAKSLPNCKAVDIGPGLNLLQEDNPDLIGSEIARWLSTLEISG

SEQ ID NO: 79 - protein, 43 aa, Synthetic construct
MAEIGTGFPFDPHYVEVLGERMHYVDVGPRDGTPVLFLHGNPT

SEQ ID NO: 80 - protein, 253 aa, Synthetic construct
SYVWRNIIPHVAPTHRCIAPDLIGMGKSDKPDLGYFFDDHVRFMDAFIEALGLEEVVLVIHDWGSALGFHWAKRNPERVKGIAFMEFIRPIPTWDEWPEFARETFQAFRTTDVGRKLIIDQNVFIEGTLPMGVVRPLTEVEMDHYREPFLNPVDREPLWRFPNELPIAGEPANIVALVEEYMDWLHQSPVPKLLFWGTPGVLIPPAEAARLAKSLPNCKAVDIGPGLNLLQEDNPDLIGSEIARWLSTLEISG

SEQ ID NO: 81 - protein, 44 aa, Synthetic construct
MAEIGTGFPFDPHYVEVLGERMHYVDVGPRDGTPVLFLHGNPTS

SEQ ID NO: 82 - protein, 252 aa, Synthetic construct
YVWRNIIPHVAPTHRCIAPDLIGMGKSDKPDLGYFFDDHVRFMDAFIEALGLEEVVLVIHDWGSALGFHWAKRNPERVKGIAFMEFIRPIPTWDEWPEFARETFQAFRTTDVGRKLIIDQNVFIEGTLPMGVVRPLTEVEMDHYREPFLNPVDREPLWRFPNELPIAGEPANIVALVEEYMDWLHQSPVPKLLFWGTPGVLIPPAEAARLAKSLPNCKAVDIGPGLNLLQEDNPDLIGSEIARWLSTLEISG

SEQ ID NO: 83 - protein, 45 aa, Synthetic construct
MAEIGTGFPFDPHYVEVLGERMHYVDVGPRDGTPVLFLHGNPTSS

SEQ ID NO: 84 - protein, 251 aa, Synthetic construct
VWRNIIPHVAPTHRCIAPDLIGMGKSDKPDLGYFFDDHVRFMDAFIEALGLEEVVLVIHDWGSALGFHWAKRNPERVKGIAFMEFIRPIPTWDEWPEFARETFQAFRTTDVGRKLIIDQNVFIEGTLPMGVVRPLTEVEMDHYREPFLNPVDREPLWRFPNELPIAGEPANIVALVEEYMDWLHQSPVPKLLFWGTPGVLIPPAEAARLAKSLPNCKAVDIGPGLNLLQEDNPDLIGSEIARWLSTLEISG

SEQ ID NO: 85 - protein, 46 aa, Synthetic construct
MAEIGTGFPFDPHYVEVLGERMHYVDVGPRDGTPVLFLHGNPTSSY

SEQ ID NO: 86 - protein, 250 aa, Synthetic construct
WRNIIPHVAPTHRCIAPDLIGMGKSDKPDLGYFFDDHVRFMDAFIEALGLEEVVLVIHDWGSALGFHWAKRNPERVKGIAFMEFIRPIPTWDEWPEFARETFQAFRTTDVGRKLIIDQNVFIEGTLPMGVVRPLTEVEMDHYREPFLNPVDREPLWRFPNELPIAGEPANIVALVEEYMDWLHQSPVPKLLFWGTPGVLIPPAEAARLAKSLPNCKAVDIGPGLNLLQEDNPDLIGSEIARWLSTLEISG

SEQ ID NO: 87 - protein, 47 aa, Synthetic construct
MAEIGTGFPFDPHYVEVLGERMHYVDVGPRDGTPVLFLHGNPTSSYV

SEQ ID NO: 88 - protein, 249 aa, Synthetic construct
RNIIPHVAPTHRCIAPDLIGMGKSDKPDLGYFFDDHVRFMDAFIEALGLEEVVLVIHDWGSALGFHWAKRNPERVKGIAFMEFIRPIPTWDEWPEFARETFQAFRTTDVGRKLIIDQNVFIEGTLPMGVVRPLTEVEMDHYREPFLNPVDREPLWRFPNELPIAGEPANIVALVEEYMDWLHQSPVPKLLFWGTPGVLIPPAEAARLAKSLPNCKAVDIGPGLNLLQEDNPDLIGSEIARWLSTLEISG

SEQ ID NO: 89 - protein, 49 aa, Synthetic construct
DMAEIGTGFPFDPHYVEVLGERMHYVDVGPRDGTPVLFLHGNPTSSYVW

SEQ ID NO: 90 - protein, 248 aa, Synthetic construct
NIIPHVAPTHRCIAPDLIGMGKSDKPDLGYFFDDHVRFMDAFIEALGLEEVVLVIHDWGSALGFHWAKRNPERVKGIAFMEFIRPIPTWDEWPEFARETFQAFRTTDVGRKLIIDQNVFIEGTLPMGVVRPLTEVEMDHYREPFLNPVDREPLWRFPNELPIAGEPANIVALVEEYMDWLHQSPVPKLLFWGTPGVLIPPAEAARLAKSLPNCKAVDIGPGLNLLQEDNPDLIGSEIARWLSTLEISG

SEQ ID NO: 91 - protein, 49 aa, Synthetic construct
MAEIGTGFPFDPHYVEVLGERMHYVDVGPRDGTPVLFLHGNPTSSYVWR

SEQ ID NO: 92 - protein, 247 aa, Synthetic construct
IIPHVAPTHRCIAPDLIGMGKSDKPDLGYFFDDHVRFMDAFIEALGLEEVVLVIHDWGSALGFHWAKRNPERVKGIAFMEFIRPIPTWDEWPEFARETFQAFRTTDVGRKLIIDQNVFIEGTLPMGVVRPLTEVEMDHYREPFLNPVDREPLWRFPNELPIAGEPANIVALVEEYMDWLHQSPVPKLLFWGTPGVLIPPAEAARLAKSLPNCKAVDIGPGLNLLQEDNPDLIGSEIARWLSTLEISG

SEQ ID NO: 93 - protein, 50 aa, Synthetic construct
MAEIGTGFPFDPHYVEVLGERMHYVDVGPRDGTPVLFLHGNPTSSYVWRN

SEQ ID NO: 94 - protein, 246 aa, Synthetic construct
IPHVAPTHRCIAPDLIGMGKSDKPDLGYFFDDHVRFMDAFIEALGLEEVVLVIHDWGSALGFHWAKRNPERVKGIAFMEFIRPIPTWDEWPEFARETFQAFRTTDVGRKLIIDQNVFIEGTLPMGVVRPLTEVEMDHYREPFLNPVDREPLWRFPNELPIAGEPANIVALVEEYMDWLHQSPVPKLLFWGTPGVLIPPAEAARLAKSLPNCKAVDIGPGLNLLQEDNPDLIGSEIARWLSTLEISG

SEQ ID NO: 95 - protein, 51 aa, Synthetic construct
MAEIGTGFPFDPHYVEVLGERMHYVDVGPRDGTPVLFLHGNPTSSYVWRNI

SEQ ID NO: 96 - protein, 245 aa, Synthetic construct
PHVAPTHRCIAPDLIGMGKSDKPDLGYFFDDHVRFMDAFIEALGLEEVVLVIHDWGSALGFHWAKRNPERVKGIAFMEFIRPIPTWDEWPEFARETFQAFRTTDVGRKLIIDQNVFIEGTLPMGVVRPLTEVEMDHYREPFLNPVDREPLWRFPNELPIAGEPANIVALVEEYMDWLHQSPVPKLLFWGTPGVLIPPAEAARLAKSLPNCKAVDIGPGLNLLQEDNPDLIGSEIARWLSTLEISG

SEQ ID NO: 97 - protein, 52 aa, Synthetic construct
MAEIGTGFPFDPHYVEVLGERMHYVDVGPRDGTPVLFLHGNPTSSYVWRNII

SEQ ID NO: 98 - protein, 244 aa, Synthetic construct
HVAPTHRCIAPDLIGMGKSDKPDLGYFFDDHVRFMDAFIEALGLEEVVLVIHDWGSALGFHWAKRNPERVKGIAFMEFIRPIPTWDEWPEFARETFQAFRTTDVGRKLIIDQNVFIEGTLPMGVVRPLTEVEMDHYREPFLNPVDREPLWRFPNELPIAGEPANIVALVEEYMDWLHQSPVPKLLFWGTPGVLIPPAEAARLAKSLPNCKAVDIGPGLNLLQEDNPDLIGSEIARWLSTLEISG

SEQ ID NO: 99 - protein, 53 aa, Synthetic construct
MAEIGTGFPFDPHYVEVLGERMHYVDVGPRDGTPVLFLHGNPTSSYVWRNIIP

SEQ ID NO: 100 - protein, 243 aa, Synthetic construct
VAPTHRCIAPDLIGMGKSDKPDLGYFFDDHVRFMDAFIEALGLEEVVLVIHDWGSALGFHWAKRNPERVKGIAFMEFIRPIPTWDEWPEFARETFQAFRTTDVGRKLIIDQNVFIEGTLPMGVVRPLTEVEMDHYREPFLNPVDREPLWRFPNELPIAGEPANIVALVEEYMDWLHQSPVPKLLFWGTPGVLIPPAEAARLAKSLPNCKAVDIGPGLNLLQEDNPDLIGSEIARWLSTLEISG

SEQ ID NO: 101 - protein, 54 aa, Synthetic construct
MAEIGTGFPFDPHYVEVLGERMHYVDVGPRDGTPVLFLHGNPTSSYVWRNIIPH

SEQ ID NO: 102 - protein, 242 aa, Synthetic construct
APTHRCIAPDLIGMGKSDKPDLGYFFDDHVRFMDAFIEALGLEEVVLVIHDWGSALGFHWAKRNPERVKGIAFMEFIRPIPTWDEWPEFARETFQAFRTTDVGRKLIIDQNVFIEGTLPMGVVRPLTEVEMDHYREPFLNPVDREPLWRFPNELPIAGEPANIVALVEEYMDWLHQSPVPKLLFWGTPGVLIPPAEAARLAKSLPNCKAVDIGPGLNLLQEDNPDLIGSEIARWLSTLEISG

SEQ ID NO: 103 - protein, 55 aa, Synthetic construct
MAEIGTGFPFDPHYVEVLGERMHYVDVGPRDGTPVLFLHGNPTSSYVWRNIIPHV

SEQ ID NO: 104 - protein, 241 aa, Synthetic construct
PTHRCIAPDLIGMGKSDKPDLGYFFDDHVRFMDAFIEALGLEEVVLVIHDWGSALGFHWAKRNPERVKGIAFMEFIRPIPTWDEWPEFARETFQAFRTTDVGRKLIIDQNVFIEGTLPMGVVRPLTEVEMDHYREPFLNPVDREPLWRFPNELPIAGEPANIVALVEEYMDWLHQSPVPKLLFWGTPGVLIPPAEAARLAKSLPNCKAVDIGPGLNLLQEDNPDLIGSEIARWLSTLEISG

SEQ ID NO: 105 - protein, 56 aa, Synthetic construct
MAEIGTGFPFDPHYVEVLGERMHYVDVGPRDGTPVLFLHGNPTSSYVWRNIIPHVA

SEQ ID NO: 106 - protein, 240 aa, Synthetic construct
THRCIAPDLIGMGKSDKPDLGYFFDDHVRFMDAFIEALGLEEVVLVIHDWGSALGFHWAKRNPERVKGIAFMEFIRPIPTWDEWPEFARETFQAFRTTDVGRKLIIDQNVFIEGTLPMGVVRPLTEVEMDHYREPFLNPVDREPLWRFPNELPIAGEPANIVALVEEYMDWLHQSPVPKLLFWGTPGVLIPPAEAARLAKSLPNCKAVDIGPGLNLLQEDNPDLIGSEIARWLSTLEISG

SEQ ID NO: 107 - protein, 57 aa, Synthetic construct
MAEIGTGFPFDPHYVEVLGERMHYVDVGPRDGTPVLFLHGNPTSSYVWRNIIPHVAP

SEQ ID NO: 108 - protein, 239 aa, Synthetic construct
HRCIAPDLIGMGKSDKPDLGYFFDDHVRFMDAFIEALGLEEVVLVIHDWGSALGFHWAKRNPERVKGIAFMEFIRPIPTWDEWPEFARETFQAFRTTDVGRKLIIDQNVFIEGTLPMGVVRPLTEVEMDHYREPFLNPVDREPLWRFPNELPIAGEPANIVALVEEYMDWLHQSPVPKLLFWGTPGVLIPPAEAARLAKSLPNCKAVDIGPGLNLLQEDNPDLIGSEIARWLSTLEISG

SEQ ID NO: 109 - protein, 58 aa, Synthetic construct
MAEIGTGFPFDPHYVEVLGERMHYVDVGPRDGTPVLFLHGNPTSSYVWRNIIPHVAPT

SEQ ID NO: 110 - protein, 238 aa, Synthetic construct
RCIAPDLIGMGKSDKPDLGYFFDDHVRFMDAFIEALGLEEVVLVIHDWGSALGFHWAKRNPERVKGIAFMEFIRPIPTWDEWPEFARETFQAFRTTDVGRKLIIDQNVFIEGTLPMGVVRPLTEVEMDHYREPFLNPVDREPLWRFPNELPIAGEPANIVALVEEYMDWLHQSPVPKLLFWGTPGVLIPPAEAARLAKSLPNCKAVDIGPGLNLLQEDNPDLIGSEIARWLSTLEISG

SEQ ID NO: 111 - protein, 59 aa, Synthetic construct
MAEIGTGFPFDPHYVEVLGERMHYVDVGPRDGTPVLFLHGNPTSSYVWRNIIPHVAPTH

SEQ ID NO: 112 - protein, 237 aa, Synthetic construct
CIAPDLIGMGKSDKPDLGYFFDDHVRFMDAFIEALGLEEVVLVIHDWGSALGFHWAKRNPERVKGIAFMEFIRPIPTWDEWPEFARETFQAFRTTDVGRKLIIDQNVFIEGTLPMGVVRPLTEVEMDHYREPFLNPVDREPLWRFPNELPIAGEPANIVALVEEYMDWLHQSPVPKLLFWGTPGVLIPPAEAARLAKSLPNCKAVDIGPGLNLLQEDNPDLIGSEIARWLSTLEISG

SEQ ID NO: 113 - protein, 60 aa, Synthetic construct
MAEIGTGFPFDPHYVEVLGERMHYVDVGPRDGTPVLFLHGNPTSSYVWRNIIPHVAPTHR

SEQ ID NO: 114 - protein, 236 aa, Synthetic construct
IAPDLIGMGKSDKPDLGYFFDDHVRFMDAFIEALGLEEVVLVIHDWGSALGFHWAKRNPERVKGIAFMEFIRPIPTWDEWPEFARETFQAFRTTDVGRKLIIDQNVFIEGTLPMGVVRPLTEVEMDHYREPFLNPVDREPLWRFPNELPIAGEPANIVALVEEYMDWLHQSPVPKLLFWGTPGVLIPPAEAARLAKSLPNCKAVDIGPGLNLLQEDNPDLIGSEIARWLSTLEISG

SEQ ID NO: 115 - protein, 61 aa, Synthetic construct
MAEIGTGFPFDPHYVEVLGERMHYVDVGPRDGTPVLFLHGNPTSSYVWRNIIPHVAPTHRC

SEQ ID NO: 116 - protein, 235 aa, Synthetic construct
APDLIGMGKSDKPDLGYFFDDHVRFMDAFIEALGLEEVVLVIHDWGSALGFHWAKRNPERVKGIAFMEFIRPIPTWDEWPEFARETFQAFRTTDVGRKLIIDQNVFIEGTLPMGVVRPLTEVEMDHYREPFLNPVDREPLWRFPNELPIAGEPANIVALVEEYMDWLHQSPVPKLLFWGTPGVLIPPAEAARLAKSLPNCKAVDIGPGLNLLQEDNPDLIGSEIARWLSTLEISG

SEQ ID NO: 117 - protein, 63 aa, Synthetic construct
XMAEIGTGFPFDPHYVEVLGERMHYVDVGPRDGTPVLFLHGNPTSSYVWRNIIPHVAPTHRCI

SEQ ID NO: 118 - protein, 234 aa, Synthetic construct
PDLIGMGKSDKPDLGYFFDDHVRFMDAFIEALGLEEVVLVIHDWGSALGFHWAKRNPERVKGIAFMEFIRPIPTWDEWPEFARETFQAFRTTDVGRKLIIDQNVFIEGTLPMGVVRPLTEVEMDHYREPFLNPVDREPLWRFPNELPIAGEPANIVALVEEYMDWLHQSPVPKLLFWGTPGVLIPPAEAARLAKSLPNCKAVDIGPGLNLLQEDNPDLIGSEIARWLSTLEISG

SEQ ID NO: 119 - protein, 63 aa, Synthetic construct
MAEIGTGFPFDPHYVEVLGERMHYVDVGPRDGTPVLFLHGNPTSSYVWRNIIPHVAPTHRCIA

SEQ ID NO: 120 - protein, 233 aa, Synthetic construct
DLIGMGKSDKPDLGYFFDDHVRFMDAFIEALGLEEVVLVIHDWGSALGFHWAKRNPERVKGIAFMEFIRPIPTWDEWPEFARETFQAFRTTDVGRKLIIDQNVFIEGTLPMGVVRPLTEVEMDHYREPFLNPVDREPLWRFPNELPIAGEPANIVALVEEYMDWLHQSPVPKLLFWGTPGVLIPPAEAARLAKSLPNCKAVDIGPGLNLLQEDNPDLIGSEIARWLSTLEISG

SEQ ID NO: 121 - protein, 64 aa, Synthetic construct
MAEIGTGFPFDPHYVEVLGERMHYVDVGPRDGTPVLFLHGNPTSSYVWRNIIPHVAPTHRCIAP

SEQ ID NO: 122 - protein, 232 aa, Synthetic construct
LIGMGKSDKPDLGYFFDDHVRFMDAFIEALGLEEVVLVIHDWGSALGFHWAKRNPERVKGIAFMEFIRPIPTWDEWPEFARETFQAFRTTDVGRKLIIDQNVFIEGTLPMGVVRPLTEVEMDHYREPFLNPVDREPLWRFPNELPIAGEPANIVALVEEYMDWLHQSPVPKLLFWGTPGVLIPPAEAARLAKSLPNCKAVDIGPGLNLLQEDNPDLIGSEIARWLSTLEISG

SEQ ID NO: 123 - protein, 65 aa, Synthetic construct
MAEIGTGFPFDPHYVEVLGERMHYVDVGPRDGTPVLFLHGNPTSSYVWRNIIPHVAPTHRCIAPD

SEQ ID NO: 124 - protein, 231 aa, Synthetic construct
IGMGKSDKPDLGYFFDDHVRFMDAFIEALGLEEVVLVIHDWGSALGFHWAKRNPERVKGIAFMEFIRPIPTWDEWPEFARETFQAFRTTDVGRKLIIDQNVFIEGTLPMGVVRPLTEVEMDHYREPFLNPVDREPLWRFPNELPIAGEPANIVALVEEYMDWLHQSPVPKLLFWGTPGVLIPPAEAARLAKSLPNCKAVDIGPGLNLLQEDNPDLIGSEIARWLSTLEISG

SEQ ID NO: 125 - protein, 66 aa, Synthetic construct
MAEIGTGFPFDPHYVEVLGERMHYVDVGPRDGTPVLFLHGNPTSSYVWRNIIPHVAPTHRCIAPDL

SEQ ID NO: 126 - protein, 230 aa, Synthetic construct
GMGKSDKPDLGYFFDDHVRFMDAFIEALGLEEVVLVIHDWGSALGFHWAKRNPERVKGIAFMEFIRPIPTWDEWPEFARETFQAFRTTDVGRKLIIDQNVFIEGTLPMGVVRPLTEVEMDHYREPFLNPVDREPLWRFPNELPIAGEPANIVALVEEYMDWLHQSPVPKLLFWGTPGVLIPPAEAARLAKSLPNCKAVDIGPGLNLLQEDNPDLIGSEIARWLSTLEISG

SEQ ID NO: 127 - protein, 67 aa, Synthetic construct
MAEIGTGFPFDPHYVEVLGERMHYVDVGPRDGTPVLFLHGNPTSSYVWRNIIPHVAPTHRCIAPDLI

SEQ ID NO: 128 - protein, 229 aa, Synthetic construct
MGKSDKPDLGYFFDDHVRFMDAFIEALGLEEVVLVIHDWGSALGFHWAKRNPERVKGIAFMEFIRPIPTWDEWPEFARETFQAFRTTDVGRKLIIDQNVFIEGTLPMGVVRPLTEVEMDHYREPFLNPVDREPLWRFPNELPIAGEPANIVALVEEYMDWLHQSPVPKLLFWGTPGVLIPPAEAARLAKSLPNCKAVDIGPGLNLLQEDNPDLIGSEIARWLSTLEISG

SEQ ID NO: 129 - protein, 68 aa, Synthetic construct
MAEIGTGFPFDPHYVEVLGERMHYVDVGPRDGTPVLFLHGNPTSSYVWRNIIPHVAPTHRCIAPDLIG

SEQ ID NO: 130 - protein, 228 aa, Synthetic construct
GKSDKPDLGYFFDDHVRFMDAFIEALGLEEVVLVIHDWGSALGFHWAKRNPERVKGIAFMEFIRPIPTWDEWPEFARETFQAFRTTDVGRKLIIDQNVFIEGTLPMGVVRPLTEVEMDHYREPFLNPVDREPLWRFPNELPIAGEPANIVALVEEYMDWLHQSPVPKLLFWGTPGVLIPPAEAARLAKSLPNCKAVDIGPGLNLLQEDNPDLIGSEIARWLSTLEISG

SEQ ID NO: 131 - protein, 69 aa, Synthetic construct
MAEIGTGFPFDPHYVEVLGERMHYVDVGPRDGTPVLFLHGNPTSSYVWRNIIPHVAPTHRCIAPDLIGM

SEQ ID NO: 132 - protein, 227 aa, Synthetic construct
KSDKPDLGYFFDDHVRFMDAFIEALGLEEVVLVIHDWGSALGFHWAKRNPERVKGIAFMEFIRPIPTWDEWPEFARETFQAFRTTDVGRKLIIDQNVFIEGTLPMGVVRPLTEVEMDHYREPFLNPVDREPLWRFPNELPIAGEPANIVALVEEYMDWLHQSPVPKLLFWGTPGVLIPPAEAARLAKSLPNCKAVDIGPGLNLLQEDNPDLIGSEIARWLSTLEISG

SEQ ID NO: 133 - protein, 70 aa, Synthetic construct
MAEIGTGFPFDPHYVEVLGERMHYVDVGPRDGTPVLFLHGNPTSSYVWRNIIPHVAPTHRCIAPDLIGMG

SEQ ID NO: 134 - protein, 226 aa, Synthetic construct
SDKPDLGYFFDDHVRFMDAFIEALGLEEVVLVIHDWGSALGFHWAKRNPERVKGIAFMEFIRPIPTWDEWPEFARETFQAFRTTDVGRKLIIDQNVFIEGTLPMGVVRPLTEVEMDHYREPFLNPVDREPLWRFPNELPIAGEPANIVALVEEYMDWLHQSPVPKLLFWGTPGVLIPPAEAARLAKSLPNCKAVDIGPGLNLLQEDNPDLIGSEIARWLSTLEISG

SEQ ID NO: 135 - protein, 71 aa, Synthetic construct
MAEIGTGFPFDPHYVEVLGERMHYVDVGPRDGTPVLFLHGNPTSSYVWRNIIPHVAPTHRCIAPDLIGMGK

SEQ ID NO: 136 - protein, 225 aa, Synthetic construct
DKPDLGYFFDDHVRFMDAFIEALGLEEVVLVIHDWGSALGFHWAKRNPERVKGIAFMEFIRPIPTWDEWPEFARETFQAFRTTDVGRKLIIDQNVFIEGTLPMGVVRPLTEVEMDHYREPFLNPVDREPLWRFPNELPIAGEPANIVALVEEYMDWLHQSPVPKLLFWGTPGVLIPPAEAARLAKSLPNCKAVDIGPGLNLLQEDNPDLIGSEIARWLSTLEISG

SEQ ID NO: 137 - protein, 72 aa, Synthetic construct
MAEIGTGFPFDPHYVEVLGERMHYVDVGPRDGTPVLFLHGNPTSSYVWRNIIPHVAPTHRCIAPDLIGMGKS

SEQ ID NO: 138 - protein, 224 aa, Synthetic construct
KPDLGYFFDDHVRFMDAFIEALGLEEVVLVIHDWGSALGFHWAKRNPERVKGIAFMEFIRPIPTWDEWPEFARETFQAFRTTDVGRKLIIDQNVFIEGTLPMGVVRPLTEVEMDHYREPFLNPVDREPLWRFPNELPIAGEPANIVALVEEYMDWLHQSPVPKLLFWGTPGVLIPPAEAARLAKSLPNCKAVDIGPGLNLLQEDNPDLIGSEIARWLSTLEISG

SEQ ID NO: 139 - protein, 73 aa, Synthetic construct
MAEIGTGFPFDPHYVEVLGERMHYVDVGPRDGTPVLFLHGNPTSSYVWRNIIPHVAPTHRCIAPDLIGMGKSD

SEQ ID NO: 140 - protein, 223 aa, Synthetic construct
PDLGYFFDDHVRFMDAFIEALGLEEVVLVIHDWGSALGFHWAKRNPERVKGIAFMEFIRPIPTWDEWPEFARETFQAFRTTDVGRKLIIDQNVFIEGTLPMGVVRPLTEVEMDHYREPFLNPVDREPLWRFPNELPIAGEPANIVALVEEYMDWLHQSPVPKLLFWGTPGVLIPPAEAARLAKSLPNCKAVDIGPGLNLLQEDNPDLIGSEIARWLSTLEISG

SEQ ID NO: 141 - protein, 74 aa, Synthetic construct
MAEIGTGFPFDPHYVEVLGERMHYVDVGPRDGTPVLFLHGNPTSSYVWRNIIPHVAPTHRCIAPDLIGMGKSDK

SEQ ID NO: 142 - protein, 222 aa, Synthetic construct
DLGYFFDDHVRFMDAFIEALGLEEVVLVIHDWGSALGFHWAKRNPERVKGIAFMEFIRPIPTWDEWPEFARETFQAFRTTDVGRKLIIDQNVFIEGTLPMGVVRPLTEVEMDHYREPFLNPVDREPLWRFPNELPIAGEPANIVALVEEYMDWLHQSPVPKLLFWGTPGVLIPPAEAARLAKSLPNCKAVDIGPGLNLLQEDNPDLIGSEIARWLSTLEISG

SEQ ID NO: 143 - protein, 75 aa, Synthetic construct
MAEIGTGFPFDPHYVEVLGERMHYVDVGPRDGTPVLFLHGNPTSSYVWRNIIPHVAPTHRCIAPDLIGMGKSDKP

SEQ ID NO: 144 - protein, 221 aa, Synthetic construct
LGYFFDDHVRFMDAFIEALGLEEVVLVIHDWGSALGFHWAKRNPERVKGIAFMEFIRPIPTWDEWPEFARETFQAFRTTDVGRKLIIDQNVFIEGTLPMGVVRPLTEVEMDHYREPFLNPVDREPLWRFPNELPIAGEPANIVALVEEYMDWLHQSPVPKLLFWGTPGVLIPPAEAARLAKSLPNCKAVDIGPGLNLLQEDNPDLIGSEIARWLSTLEISG

SEQ ID NO: 145 - protein, 76 aa, Synthetic construct
MAEIGTGFPFDPHYVEVLGERMHYVDVGPRDGTPVLFLHGNPTSSYVWRNIIPHVAPTHRCIAPDLIGMGKSDKPD

SEQ ID NO: 146 - protein, 220 aa, Synthetic construct
GYFFDDHVRFMDAFIEALGLEEVVLVIHDWGSALGFHWAKRNPERVKGIAFMEFIRPIPTWDEWPEFARETFQAFRTTDVGRKLIIDQNVFIEGTLPMGVVRPLTEVEMDHYREPFLNPVDREPLWRFPNELPIAGEPANIVALVEEYMDWLHQSPVPKLLFWGTPGVLIPPAEAARLAKSLPNCKAVDIGPGLNLLQEDNPDLIGSEIARWLSTLEISG

SEQ ID NO: 147 - protein, 77 aa, Synthetic construct
MAEIGTGFPFDPHYVEVLGERMHYVDVGPRDGTPVLFLHGNPTSSYVWRNIIPHVAPTHRCIAPDLIGMGKSDKPDL

SEQ ID NO: 148 - protein, 219 aa, Synthetic construct
YFFDDHVRFMDAFIEALGLEEVVLVIHDWGSALGFHWAKRNPERVKGIAFMEFIRPIPTWDEWPEFARETFQAFRTTDVGRKLIIDQNVFIEGTLPMGVVRPLTEVEMDHYREPFLNPVDREPLWRFPNELPIAGEPANIVALVEEYMDWLHQSPVPKLLFWGTPGVLIPPAEAARLAKSLPNCKAVDIGPGLNLLQEDNPDLIGSEIARWLSTLEISG

SEQ ID NO: 149 - protein, 78 aa, Synthetic construct
MAEIGTGFPFDPHYVEVLGERMHYVDVGPRDGTPVLFLHGNPTSSYVWRNIIPHVAPTHRCIAPDLIGMGKSDKPDLG

SEQ ID NO: 150 - protein, 218 aa, Synthetic construct
FFDDHVRFMDAFIEALGLEEVVLVIHDWGSALGFHWAKRNPERVKGIAFMEFIRPIPTWDEWPEFARETFQAFRTTDVGRKLIIDQNVFIEGTLPMGVVRPLTEVEMDHYREPFLNPVDREPLWRFPNELPIAGEPANIVALVEEYMDWLHQSPVPKLLFWGTPGVLIPPAEAARLAKSLPNCKAVDIGPGLNLLQEDNPDLIGSEIARWLSTLEISG

SEQ ID NO: 151 - protein, 79 aa, Synthetic construct
MAEIGTGFPFDPHYVEVLGERMHYVDVGPRDGTPVLFLHGNPTSSYVWRNIIPHVAPTHRCIAPDLIGMGKSDKPDLGY

SEQ ID NO: 152 - protein, 217 aa, Synthetic construct
FDDHVRFMDAFIEALGLEEVVLVIHDWGSALGFHWAKRNPERVKGIAFMEFIRPIPTWDEWPEFARETFQAFRTTDVGRKLIIDQNVFIEGTLPMGVVRPLTEVEMDHYREPFLNPVDREPLWRFPNELPIAGEPANIVALVEEYMDWLHQSPVPKLLFWGTPGVLIPPAEAARLAKSLPNCKAVDIGPGLNLLQEDNPDLIGSEIARWLSTLEISG

SEQ ID NO: 153 - protein, 80 aa, Synthetic construct
MAEIGTGFPFDPHYVEVLGERMHYVDVGPRDGTPVLFLHGNPTSSYVWRNIIPHVAPTHRCIAPDLIGMGKSDKPDLGYF

SEQ ID NO: 154 - protein, 216 aa, Synthetic construct
DDHVRFMDAFIEALGLEEVVLVIHDWGSALGFHWAKRNPERVKGIAFMEFIRPIPTWDEWPEFARETFQAFRTTDVGRKLIIDQNVFIEGTLPMGVVRPLTEVEMDHYREPFLNPVDREPLWRFPNELPIAGEPANIVALVEEYMDWLHQSPVPKLLFWGTPGVLIPPAEAARLAKSLPNCKAVDIGPGLNLLQEDNPDLIGSEIARWLSTLEISG

SEQ ID NO: 155 - protein, 81 aa, Synthetic construct
MAEIGTGFPFDPHYVEVLGERMHYVDVGPRDGTPVLFLHGNPTSSYVWRNIIPHVAPTHRCIAPDLIGMGKSDKPDLGYFF

SEQ ID NO: 156 - protein, 215 aa, Synthetic construct
DHVRFMDAFIEALGLEEVVLVIHDWGSALGFHWAKRNPERVKGIAFMEFIRPIPTWDEWPEFARETFQAFRTTDVGRKLIIDQNVFIEGTLPMGVVRPLTEVEMDHYREPFLNPVDREPLWRFPNELPIAGEPANIVALVEEYMDWLHQSPVPKLLFWGTPGVLIPPAEAARLAKSLPNCKAVDIGPGLNLLQEDNPDLIGSEIARWLSTLEISG

SEQ ID NO: 157 - protein, 82 aa, Synthetic construct
MAEIGTGFPFDPHYVEVLGERMHYVDVGPRDGTPVLFLHGNPTSSYVWRNIIPHVAPTHRCIAPDLIGMGKSDKPDLGYFFD

SEQ ID NO: 158 - protein, 214 aa, Synthetic construct
HVRFMDAFIEALGLEEVVLVIHDWGSALGFHWAKRNPERVKGIAFMEFIRPIPTWDEWPEFARETFQAFRTTDVGRKLIIDQNVFIEGTLPMGVVRPLTEVEMDHYREPFLNPVDREPLWRFPNELPIAGEPANIVALVEEYMDWLHQSPVPKLLFWGTPGVLIPPAEAARLAKSLPNCKAVDIGPGLNLLQEDNPDLIGSEIARWLSTLEISG

SEQ ID NO: 159 - protein, 83 aa, Synthetic construct
MAEIGTGFPFDPHYVEVLGERMHYVDVGPRDGTPVLFLHGNPTSSYVWRNIIPHVAPTHRCIAPDLIGMGKSDKPDLGYFFDD

SEQ ID NO: 160 - protein, 213 aa, Synthetic construct
VRFMDAFIEALGLEEVVLVIHDWGSALGFHWAKRNPERVKGIAFMEFIRPIPTWDEWPEFARETFQAFRTTDVGRKLIIDQNVFIEGTLPMGVVRPLTEVEMDHYREPFLNPVDREPLWRFPNELPIAGEPANIVALVEEYMDWLHQSPVPKLLFWGTPGVLIPPAEAARLAKSLPNCKAVDIGPGLNLLQEDNPDLIGSEIARWLSTLEISG

SEQ ID NO: 161 - protein, 84 aa, Synthetic construct
MAEIGTGFPFDPHYVEVLGERMHYVDVGPRDGTPVLFLHGNPTSSYVWRNIIPHVAPTHRCIAPDLIGMGKSDKPDLGYFFDDH

SEQ ID NO: 162 - protein, 212 aa, Synthetic construct
RFMDAFIEALGLEEVVLVIHDWGSALGFHWAKRNPERVKGIAFMEFIRPIPTWDEWPEFARETFQAFRTTDVGRKLIIDQNVFIEGTLPMGVVRPLTEVEMDHYREPFLNPVDREPLWRFPNELPIAGEPANIVALVEEYMDWLHQSPVPKLLFWGTPGVLIPPAEAARLAKSLPNCKAVDIGPGLNLLQEDNPDLIGSEIARWLSTLEISG

SEQ ID NO: 163 - protein, 85 aa, Synthetic construct
MAEIGTGFPFDPHYVEVLGERMHYVDVGPRDGTPVLFLHGNPTSSYVWRNIIPHVAPTHRCIAPDLIGMGKSDKPDLGYFFDDHV

SEQ ID NO: 164 - protein, 211 aa, Synthetic construct
FMDAFIEALGLEEVVLVIHDWGSALGFHWAKRNPERVKGIAFMEFIRPIPTWDEWPEFARETFQAFRTTDVGRKLIIDQNVFIEGTLPMGVVRPLTEVEMDHYREPFLNPVDREPLWRFPNELPIAGEPANIVALVEEYMDWLHQSPVPKLLFWGTPGVLIPPAEAARLAKSLPNCKAVDIGPGLNLLQEDNPDLIGSEIARWLSTLEISG

SEQ ID NO: 165 - protein, 86 aa, Synthetic construct
MAEIGTGFPFDPHYVEVLGERMHYVDVGPRDGTPVLFLHGNPTSSYVWRNIIPHVAPTHRCIAPDLIGMGKSDKPDLGYFFDDHVR

SEQ ID NO: 166 - protein, 210 aa, Synthetic construct
MDAFIEALGLEEVVLVIHDWGSALGFHWAKRNPERVKGIAFMEFIRPIPTWDEWPEFARETFQAFRTTDVGRKLIIDQNVFIEGTLPMGVVRPLTEVEMDHYREPFLNPVDREPLWRFPNELPIAGEPANIVALVEEYMDWLHQSPVPKLLFWGTPGVLIPPAEAARLAKSLPNCKAVDIGPGLNLLQEDNPDLIGSEIARWLSTLEISG

SEQ ID NO: 167 - protein, 87 aa, Synthetic construct
MAEIGTGFPFDPHYVEVLGERMHYVDVGPRDGTPVLFLHGNPTSSYVWRNIIPHVAPTHRCIAPDLIGMGKSDKPDLGYFFDDHVRF

SEQ ID NO: 168 - protein, 209 aa, Synthetic construct
DAFIEALGLEEVVLVIHDWGSALGFHWAKRNPERVKGIAFMEFIRPIPTWDEWPEFARETFQAFRTTDVGRKLIIDQNVFIEGTLPMGVVRPLTEVEMDHYREPFLNPVDREPLWRFPNELPIAGEPANIVALVEEYMDWLHQSPVPKLLFWGTPGVLIPPAEAARLAKSLPNCKAVDIGPGLNLLQEDNPDLIGSEIARWLSTLEISG

SEQ ID NO: 169 - protein, 88 aa, Synthetic construct
MAEIGTGFPFDPHYVEVLGERMHYVDVGPRDGTPVLFLHGNPTSSYVWRNIIPHVAPTHRCIAPDLIGMGKSDKPDLGYFFDDHVRFM

SEQ ID NO: 170 - protein, 208 aa, Synthetic construct
AFIEALGLEEVVLVIHDWGSALGFHWAKRNPERVKGIAFMEFIRPIPTWDEWPEFARETFQAFRTTDVGRKLIIDQNVFIEGTLPMGVVRPLTEVEMDHYREPFLNPVDREPLWRFPNELPIAGEPANIVALVEEYMDWLHQSPVPKLLFWGTPGVLIPPAEAARLAKSLPNCKAVDIGPGLNLLQEDNPDLIGSEIARWLSTLEISG

SEQ ID NO: 171 - protein, 89 aa, Synthetic construct
MAEIGTGFPFDPHYVEVLGERMHYVDVGPRDGTPVLFLHGNPTSSYVWRNIIPHVAPTHRCIAPDLIGMGKSDKPDLGYFFDDHVRFMD

SEQ ID NO: 172 - protein, 207 aa, Synthetic construct
FIEALGLEEVVLVIHDWGSALGFHWAKRNPERVKGIAFMEFIRPIPTWDEWPEFARETFQAFRTTDVGRKLIIDQNVFIEGTLPMGVVRPLTEVEMDHYREPFLNPVDREPLWRFPNELPIAGEPANIVALVEEYMDWLHQSPVPKLLFWGTPGVLIPPAEAARLAKSLPNCKAVDIGPGLNLLQEDNPDLIGSEIARWLSTLEISG

SEQ ID NO: 173 - protein, 90 aa, Synthetic construct
MAEIGTGFPFDPHYVEVLGERMHYVDVGPRDGTPVLFLHGNPTSSYVWRNIIPHVAPTHRCIAPDLIGMGKSDKPDLGYFFDDHVRFMDA

SEQ ID NO: 174 - protein, 206 aa, Synthetic construct
IEALGLEEVVLVIHDWGSALGFHWAKRNPERVKGIAFMEFIRPIPTWDEWPEFARETFQAFRTTDVGRKLIIDQNVFIEGTLPMGVVRPLTEVEMDHYREPFLNPVDREPLWRFPNELPIAGEPANIVALVEEYMDWLHQSPVPKLLFWGTPGVLIPPAEAARLAKSLPNCKAVDIGPGLNLLQEDNPDLIGSEIARWLSTLEISG

SEQ ID NO: 175 - protein, 91 aa, Synthetic construct
MAEIGTGFPFDPHYVEVLGERMHYVDVGPRDGTPVLFLHGNPTSSYVWRNIIPHVAPTHRCIAPDLIGMGKSDKPDLGYFFDDHVRFMDAF

SEQ ID NO: 176 - protein, 205 aa, Synthetic construct
EALGLEEVVLVIHDWGSALGFHWAKRNPERVKGIAFMEFIRPIPTWDEWPEFARETFQAFRTTDVGRKLIIDQNVFIEGTLPMGVVRPLTEVEMDHYREPFLNPVDREPLWRFPNELPIAGEPANIVALVEEYMDWLHQSPVPKLLFWGTPGVLIPPAEAARLAKSLPNCKAVDIGPGLNLLQEDNPDLIGSEIARWLSTLEISG

SEQ ID NO: 177 - protein, 92 aa, Synthetic construct
MAEIGTGFPFDPHYVEVLGERMHYVDVGPRDGTPVLFLHGNPTSSYVWRNIIPHVAPTHRCIAPDLIGMGKSDKPDLGYFFDDHVRFMDAFI

SEQ ID NO: 178 - protein, 204 aa, Synthetic construct
ALGLEEVVLVIHDWGSALGFHWAKRNPERVKGIAFMEFIRPIPTWDEWPEFARETFQAFRTTDVGRKLIIDQNVFIEGTLPMGVVRPLTEVEMDHYREPFLNPVDREPLWRFPNELPIAGEPANIVALVEEYMDWLHQSPVPKLLFWGTPGVLIPPAEAARLAKSLPNCKAVDIGPGLNLLQEDNPDLIGSEIARWLSTLEISG

SEQ ID NO: 179 - protein, 93 aa, Synthetic construct
MAEIGTGFPFDPHYVEVLGERMHYVDVGPRDGTPVLFLHGNPTSSYVWRNIIPHVAPTHRCIAPDLIGMGKSDKPDLGYFFDDHVRFMDAFIE

SEQ ID NO: 180 - protein, 203 aa, Synthetic construct
LGLEEVVLVIHDWGSALGFHWAKRNPERVKGIAFMEFIRPIPTWDEWPEFARETFQAFRTTDVGRKLIIDQNVFIEGTLPMGVVRPLTEVEMDHYREPFLNPVDREPLWRFPNELPIAGEPANIVALVEEYMDWLHQSPVPKLLFWGTPGVLIPPAEAARLAKSLPNCKAVDIGPGLNLLQEDNPDLIGSEIARWLSTLEISG

SEQ ID NO: 181 - protein, 94 aa, Synthetic construct
MAEIGTGFPFDPHYVEVLGERMHYVDVGPRDGTPVLFLHGNPTSSYVWRNIIPHVAPTHRCIAPDLIGMGKSDKPDLGYFFDDHVRFMDAFIEA

SEQ ID NO: 182 - protein, 202 aa, Synthetic construct
GLEEVVLVIHDWGSALGFHWAKRNPERVKGIAFMEFIRPIPTWDEWPEFARETFQAFRTTDVGRKLIIDQNVFIEGTLPMGVVRPLTEVEMDHYREPFLNPVDREPLWRFPNELPIAGEPANIVALVEEYMDWLHQSPVPKLLFWGTPGVLIPPAEAARLAKSLPNCKAVDIGPGLNLLQEDNPDLIGSEIARWLSTLEISG

SEQ ID NO: 183 - protein, 95 aa, Synthetic construct
MAEIGTGFPFDPHYVEVLGERMHYVDVGPRDGTPVLFLHGNPTSSYVWRNIIPHVAPTHRCIAPDLIGMGKSDKPDLGYFFDDHVRFMDAFIEAL

SEQ ID NO: 184 - protein, 201 aa, Synthetic construct
LEEVVLVIHDWGSALGFHWAKRNPERVKGIAFMEFIRPIPTWDEWPEFARETFQAFRTTDVGRKLIIDQNVFIEGTLPMGVVRPLTEVEMDHYREPFLNPVDREPLWRFPNELPIAGEPANIVALVEEYMDWLHQSPVPKLLFWGTPGVLIPPAEAARLAKSLPNCKAVDIGPGLNLLQEDNPDLIGSEIARWLSTLEISG

SEQ ID NO: 185 - protein, 96 aa, Synthetic construct
MAEIGTGFPFDPHYVEVLGERMHYVDVGPRDGTPVLFLHGNPTSSYVWRNIIPHVAPTHRCIAPDLIGMGKSDKPDLGYFFDDHVRFMDAFIEALG

SEQ ID NO: 186 - protein, 200 aa, Synthetic construct
EEVVLVIHDWGSALGFHWAKRNPERVKGIAFMEFIRPIPTWDEWPEFARETFQAFRTTDVGRKLIIDQNVFIEGTLPMGVVRPLTEVEMDHYREPFLNPVDREPLWRFPNELPIAGEPANIVALVEEYMDWLHQSPVPKLLFWGTPGVLIPPAEAARLAKSLPNCKAVDIGPGLNLLQEDNPDLIGSEIARWLSTLEISG

SEQ ID NO: 187 - protein, 97 aa, Synthetic construct
MAEIGTGFPFDPHYVEVLGERMHYVDVGPRDGTPVLFLHGNPTSSYVWRNIIPHVAPTHRCIAPDLIGMGKSDKPDLGYFFDDHVRFMDAFIEALGL

SEQ ID NO: 188 - protein, 199 aa, Synthetic construct
EVVLVIHDWGSALGFHWAKRNPERVKGIAFMEFIRPIPTWDEWPEFARETFQAFRTTDVGRKLIIDQNVFIEGTLPMGVVRPLTEVEMDHYREPFLNPVDREPLWRFPNELPIAGEPANIVALVEEYMDWLHQSPVPKLLFWGTPGVLIPPAEAARLAKSLPNCKAVDIGPGLNLLQEDNPDLIGSEIARWLSTLEISG

SEQ ID NO: 189 - protein, 98 aa, Synthetic construct
MAEIGTGFPFDPHYVEVLGERMHYVDVGPRDGTPVLFLHGNPTSSYVWRNIIPHVAPTHRCIAPDLIGMGKSDKPDLGYFFDDHVRFMDAFIEALGLE

SEQ ID NO: 190 - protein, 198 aa, Synthetic construct
VVLVIHDWGSALGFHWAKRNPERVKGIAFMEFIRPIPTWDEWPEFARETFQAFRTTDVGRKLIIDQNVFIEGTLPMGVVRPLTEVEMDHYREPFLNPVDREPLWRFPNELPIAGEPANIVALVEEYMDWLHQSPVPKLLFWGTPGVLIPPAEAARLAKSLPNCKAVDIGPGLNLLQEDNPDLIGSEIARWLSTLEISG

SEQ ID NO: 191 - protein, 99 aa, Synthetic construct
MAEIGTGFPFDPHYVEVLGERMHYVDVGPRDGTPVLFLHGNPTSSYVWRNIIPHVAPTHRCIAPDLIGMGKSDKPDLGYFFDDHVRFMDAFIEALGLEE

SEQ ID NO: 192 - protein, 197 aa, Synthetic construct
VLVIHDWGSALGFHWAKRNPERVKGIAFMEFIRPIPTWDEWPEFARETFQAFRTTDVGRKLIIDQNVFIEGTLPMGVVRPLTEVEMDHYREPFLNPVDREPLWRFPNELPIAGEPANIVALVEEYMDWLHQSPVPKLLFWGTPGVLIPPAEAARLAKSLPNCKAVDIGPGLNLLQEDNPDLIGSEIARWLSTLEISG

SEQ ID NO: 193 - protein, 100 aa, Synthetic construct
MAEIGTGFPFDPHYVEVLGERMHYVDVGPRDGTPVLFLHGNPTSSYVWRNIIPHVAPTHRCIAPDLIGMGKSDKPDLGYFFDDHVRFMDAFIEALGLEEV

SEQ ID NO: 194 - protein, 196 aa, Synthetic construct
LVIHDWGSALGFHWAKRNPERVKGIAFMEFIRPIPTWDEWPEFARETFQAFRTTDVGRKLIIDQNVFIEGTLPMGVVRPLTEVEMDHYREPFLNPVDREPLWRFPNELPIAGEPANIVALVEEYMDWLHQSPVPKLLFWGTPGVLIPPAEAARLAKSLPNCKAVDIGPGLNLLQEDNPDLIGSEIARWLSTLEISG

SEQ ID NO: 195 - protein, 101 aa, Synthetic construct
MAEIGTGFPFDPHYVEVLGERMHYVDVGPRDGTPVLFLHGNPTSSYVWRNIIPHVAPTHRCIAPDLIGMGKSDKPDLGYFFDDHVRFMDAFIEALGLEEVV

SEQ ID NO: 196 - protein, 195 aa, Synthetic construct
VIHDWGSALGFHWAKRNPERVKGIAFMEFIRPIPTWDEWPEFARETFQAFRTTDVGRKLIIDQNVFIEGTLPMGVVRPLTEVEMDHYREPFLNPVDREPLWRFPNELPIAGEPANIVALVEEYMDWLHQSPVPKLLFWGTPGVLIPPAEAARLAKSLPNCKAVDIGPGLNLLQEDNPDLIGSEIARWLSTLEISG

SEQ ID NO: 197 - protein, 102 aa, Synthetic construct
MAEIGTGFPFDPHYVEVLGERMHYVDVGPRDGTPVLFLHGNPTSSYVWRNIIPHVAPTHRCIAPDLIGMGKSDKPDLGYFFDDHVRFMDAFIEALGLEEVVL

SEQ ID NO: 198 - protein, 194 aa, Synthetic construct
IHDWGSALGFHWAKRNPERVKGIAFMEFIRPIPTWDEWPEFARETFQAFRTTDVGRKLIIDQNVFIEGTLPMGVVRPLTEVEMDHYREPFLNPVDREPLWRFPNELPIAGEPANIVALVEEYMDWLHQSPVPKLLFWGTPGVLIPPAEAARLAKSLPNCKAVDIGPGLNLLQEDNPDLIGSEIARWLSTLEISG

SEQ ID NO: 199 - protein, 103 aa, Synthetic construct
MAEIGTGFPFDPHYVEVLGERMHYVDVGPRDGTPVLFLHGNPTSSYVWRNIIPHVAPTHRCIAPDLIGMGKSDKPDLGYFFDDHVRFMDAFIEALGLEEVVLV

SEQ ID NO: 200 - protein, 193 aa, Synthetic construct
HDWGSALGFHWAKRNPERVKGIAFMEFIRPIPTWDEWPEFARETFQAFRTTDVGRKLIIDQNVFIEGTLPMGVVRPLTEVEMDHYREPFLNPVDREPLWRFPNELPIAGEPANIVALVEEYMDWLHQSPVPKLLFWGTPGVLIPPAEAARLAKSLPNCKAVDIGPGLNLLQEDNPDLIGSEIARWLSTLEISG

SEQ ID NO: 201 - protein, 104 aa, Synthetic construct
MAEIGTGFPFDPHYVEVLGERMHYVDVGPRDGTPVLFLHGNPTSSYVWRNIIPHVAPTHRCIAPDLIGMGKSDKPDLGYFFDDHVRFMDAFIEALGLEEVVLVI

SEQ ID NO: 202 - protein, 192 aa, Synthetic construct
DWGSALGFHWAKRNPERVKGIAFMEFIRPIPTWDEWPEFARETFQAFRTTDVGRKLIIDQNVFIEGTLPMGVVRPLTEVEMDHYREPFLNPVDREPLWRFPNELPIAGEPANIVALVEEYMDWLHQSPVPKLLFWGTPGVLIPPAEAARLAKSLPNCKAVDIGPGLNLLQEDNPDLIGSEIARWLSTLEISG

SEQ ID NO: 203 - protein, 105 aa, Synthetic construct
MAEIGTGFPFDPHYVEVLGERMHYVDVGPRDGTPVLFLHGNPTSSYVWRNIIPHVAPTHRCIAPDLIGMGKSDKPDLGYFFDDHVRFMDAFIEALGLEEVVLVIH

SEQ ID NO: 204 - protein, 191 aa, Synthetic construct
WGSALGFHWAKRNPERVKGIAFMEFIRPIPTWDEWPEFARETFQAFRTTDVGRKLIIDQNVFIEGTLPMGVVRPLTEVEMDHYREPFLNPVDREPLWRFPNELPIAGEPANIVALVEEYMDWLHQSPVPKLLFWGTPGVLIPPAEAARLAKSLPNCKAVDIGPGLNLLQEDNPDLIGSEIARWLSTLEISG

SEQ ID NO: 205 - protein, 106 aa, Synthetic construct
MAEIGTGFPFDPHYVEVLGERMHYVDVGPRDGTPVLFLHGNPTSSYVWRNIIPHVAPTHRCIAPDLIGMGKSDKPDLGYFFDDHVRFMDAFIEALGLEEVVLVIHD

SEQ ID NO: 206 - protein, 190 aa, Synthetic construct
GSALGFHWAKRNPERVKGIAFMEFIRPIPTWDEWPEFARETFQAFRTTDVGRKLIIDQNVFIEGTLPMGVVRPLTEVEMDHYREPFLNPVDREPLWRFPNELPIAGEPANIVALVEEYMDWLHQSPVPKLLFWGTPGVLIPPAEAARLAKSLPNCKAVDIGPGLNLLQEDNPDLIGSEIARWLSTLEISG

SEQ ID NO: 207 - protein, 107 aa, Synthetic construct
MAEIGTGFPFDPHYVEVLGERMHYVDVGPRDGTPVLFLHGNPTSSYVWRNIIPHVAPTHRCIAPDLIGMGKSDKPDLGYFFDDHVRFMDAFIEALGLEEVVLVIHDW

SEQ ID NO: 208 - protein, 189 aa, Synthetic construct
SALGFHWAKRNPERVKGIAFMEFIRPIPTWDEWPEFARETFQAFRTTDVGRKLIIDQNVFIEGTLPMGVVRPLTEVEMDHYREPFLNPVDREPLWRFPNELPIAGEPANIVALVEEYMDWLHQSPVPKLLFWGTPGVLIPPAEAARLAKSLPNCKAVDIGPGLNLLQEDNPDLIGSEIARWLSTLEISG

SEQ ID NO: 209 - protein, 108 aa, Synthetic construct
MAEIGTGFPFDPHYVEVLGERMHYVDVGPRDGTPVLFLHGNPTSSYVWRNIIPHVAPTHRCIAPDLIGMGKSDKPDLGYFFDDHVRFMDAFIEALGLEEVVLVIHDWG

SEQ ID NO: 210 - protein, 188 aa, Synthetic construct
ALGFHWAKRNPERVKGIAFMEFIRPIPTWDEWPEFARETFQAFRTTDVGRKLIIDQNVFIEGTLPMGVVRPLTEVEMDHYREPFLNPVDREPLWRFPNELPIAGEPANIVALVEEYMDWLHQSPVPKLLFWGTPGVLIPPAEAARLAKSLPNCKAVDIGPGLNLLQEDNPDLIGSEIARWLSTLEISG

SEQ ID NO: 211 - protein, 109 aa, Synthetic construct
MAEIGTGFPFDPHYVEVLGERMHYVDVGPRDGTPVLFLHGNPTSSYVWRNIIPHVAPTHRCIAPDLIGMGKSDKPDLGYFFDDHVRFMDAFIEALGLEEVVLVIHDWGS

SEQ ID NO: 212 - protein, 187 aa, Synthetic construct
LGFHWAKRNPERVKGIAFMEFIRPIPTWDEWPEFARETFQAFRTTDVGRKLIIDQNVFIEGTLPMGVVRPLTEVEMDHYREPFLNPVDREPLWRFPNELPIAGEPANIVALVEEYMDWLHQSPVPKLLFWGTPGVLIPPAEAARLAKSLPNCKAVDIGPGLNLLQEDNPDLIGSEIARWLSTLEISG

SEQ ID NO: 213 - protein, 110 aa, Synthetic construct
MAEIGTGFPFDPHYVEVLGERMHYVDVGPRDGTPVLFLHGNPTSSYVWRNIIPHVAPTHRCIAPDLIGMGKSDKPDLGYFFDDHVRFMDAFIEALGLEEVVLVIHDWGSA

SEQ ID NO: 214 - protein, 186 aa, Synthetic construct
GFHWAKRNPERVKGIAFMEFIRPIPTWDEWPEFARETFQAFRTTDVGRKLIIDQNVFIEGTLPMGVVRPLTEVEMDHYREPFLNPVDREPLWRFPNELPIAGEPANIVALVEEYMDWLHQSPVPKLLFWGTPGVLIPPAEAARLAKSLPNCKAVDIGPGLNLLQEDNPDLIGSEIARWLSTLEISG

SEQ ID NO: 215 - protein, 111 aa, Synthetic construct
MAEIGTGFPFDPHYVEVLGERMHYVDVGPRDGTPVLFLHGNPTSSYVWRNIIPHVAPTHRCIAPDLIGMGKSDKPDLGYFFDDHVRFMDAFIEALGLEEVVLVIHDWGSAL

SEQ ID NO: 216 - protein, 185 aa, Synthetic construct
FHWAKRNPERVKGIAFMEFIRPIPTWDEWPEFARETFQAFRTTDVGRKLIIDQNVFIEGTLPMGVVRPLTEVEMDHYREPFLNPVDREPLWRFPNELPIAGEPANIVALVEEYMDWLHQSPVPKLLFWGTPGVLIPPAEAARLAKSLPNCKAVDIGPGLNLLQEDNPDLIGSEIARWLSTLEISG

SEQ ID NO: 217 - protein, 112 aa, Synthetic construct
MAEIGTGFPFDPHYVEVLGERMHYVDVGPRDGTPVLFLHGNPTSSYVWRNIIPHVAPTHRCIAPDLIGMGKSDKPDLGYFFDDHVRFMDAFIEALGLEEVVLVIHDWGSALG

SEQ ID NO: 218 - protein, 184 aa, Synthetic construct
HWAKRNPERVKGIAFMEFIRPIPTWDEWPEFARETFQAFRTTDVGRKLIIDQNVFIEGTLPMGVVRPLTEVEMDHYREPFLNPVDREPLWRFPNELPIAGEPANIVALVEEYMDWLHQSPVPKLLFWGTPGVLIPPAEAARLAKSLPNCKAVDIGPGLNLLQEDNPDLIGSEIARWLSTLEISG

SEQ ID NO: 219 - protein, 113 aa, Synthetic construct
MAEIGTGFPFDPHYVEVLGERMHYVDVGPRDGTPVLFLHGNPTSSYVWRNIIPHVAPTHRCIAPDLIGMGKSDKPDLGYFFDDHVRFMDAFIEALGLEEVVLVIHDWGSALGF

SEQ ID NO: 220 - protein, 183 aa, Synthetic construct
WAKRNPERVKGIAFMEFIRPIPTWDEWPEFARETFQAFRTTDVGRKLIIDQNVFIEGTLPMGVVRPLTEVEMDHYREPFLNPVDREPLWRFPNELPIAGEPANIVALVEEYMDWLHQSPVPKLLFWGTPGVLIPPAEAARLAKSLPNCKAVDIGPGLNLLQEDNPDLIGSEIARWLSTLEISG

SEQ ID NO: 221 - protein, 114 aa, Synthetic construct
MAEIGTGFPFDPHYVEVLGERMHYVDVGPRDGTPVLFLHGNPTSSYVWRNIIPHVAPTHRCIAPDLIGMGKSDKPDLGYFFDDHVRFMDAFIEALGLEEVVLVIHDWGSALGFH

SEQ ID NO: 222 - protein, 182 aa, Synthetic construct
AKRNPERVKGIAFMEFIRPIPTWDEWPEFARETFQAFRTTDVGRKLIIDQNVFIEGTLPMGVVRPLTEVEMDHYREPFLNPVDREPLWRFPNELPIAGEPANIVALVEEYMDWLHQSPVPKLLFWGTPGVLIPPAEAARLAKSLPNCKAVDIGPGLNLLQEDNPDLIGSEIARWLSTLEISG

SEQ ID NO: 223 - protein, 115 aa, Synthetic construct
MAEIGTGFPFDPHYVEVLGERMHYVDVGPRDGTPVLFLHGNPTSSYVWRNIIPHVAPTHRCIAPDLIGMGKSDKPDLGYFFDDHVRFMDAFIEALGLEEVVLVIHDWGSALGFHW

SEQ ID NO: 224 - protein, 181 aa, Synthetic construct
KRNPERVKGIAFMEFIRPIPTWDEWPEFARETFQAFRTTDVGRKLIIDQNVFIEGTLPMGVVRPLTEVEMDHYREPFLNPVDREPLWRFPNELPIAGEPANIVALVEEYMDWLHQSPVPKLLFWGTPGVLIPPAEAARLAKSLPNCKAVDIGPGLNLLQEDNPDLIGSEIARWLSTLEISG

SEQ ID NO: 225 - protein, 116 aa, Synthetic construct
MAEIGTGFPFDPHYVEVLGERMHYVDVGPRDGTPVLFLHGNPTSSYVWRNIIPHVAPTHRCIAPDLIGMGKSDKPDLGYFFDDHVRFMDAFIEALGLEEVVLVIHDWGSALGFHWA

SEQ ID NO: 226 - protein, 180 aa, Synthetic construct
RNPERVKGIAFMEFIRPIPTWDEWPEFARETFQAFRTTDVGRKLIIDQNVFIEGTLPMGVVRPLTEVEMDHYREPFLNPVDREPLWRFPNELPIAGEPANIVALVEEYMDWLHQSPVPKLLFWGTPGVLIPPAEAARLAKSLPNCKAVDIGPGLNLLQEDNPDLIGSEIARWLSTLEISG

SEQ ID NO: 227 - protein, 117 aa, Synthetic construct
MAEIGTGFPFDPHYVEVLGERMHYVDVGPRDGTPVLFLHGNPTSSYVWRNIIPHVAPTHRCIAPDLIGMGKSDKPDLGYFFDDHVRFMDAFIEALGLEEVVLVIHDWGSALGFHWAK

SEQ ID NO: 228 - protein, 179 aa, Synthetic construct
NPERVKGIAFMEFIRPIPTWDEWPEFARETFQAFRTTDVGRKLIIDQNVFIEGTLPMGVVRPLTEVEMDHYREPFLNPVDREPLWRFPNELPIAGEPANIVALVEEYMDWLHQSPVPKLLFWGTPGVLIPPAEAARLAKSLPNCKAVDIGPGLNLLQEDNPDLIGSEIARWLSTLEISG

SEQ ID NO: 229 - protein, 118 aa, Synthetic construct
MAEIGTGFPFDPHYVEVLGERMHYVDVGPRDGTPVLFLHGNPTSSYVWRNIIPHVAPTHRCIAPDLIGMGKSDKPDLGYFFDDHVRFMDAFIEALGLEEVVLVIHDWGSALGFHWAKR

SEQ ID NO: 230 - protein, 178 aa, Synthetic construct
PERVKGIAFMEFIRPIPTWDEWPEFARETFQAFRTTDVGRKLIIDQNVFIEGTLPMGVVRPLTEVEMDHYREPFLNPVDREPLWRFPNELPIAGEPANIVALVEEYMDWLHQSPVPKLLFWGTPGVLIPPAEAARLAKSLPNCKAVDIGPGLNLLQEDNPDLIGSEIARWLSTLEISG

SEQ ID NO: 231 - protein, 119 aa, Synthetic construct
MAEIGTGFPFDPHYVEVLGERMHYVDVGPRDGTPVLFLHGNPTSSYVWRNIIPHVAPTHRCIAPDLIGMGKSDKPDLGYFFDDHVRFMDAFIEALGLEEVVLVIHDWGSALGFHWAKRN

SEQ ID NO: 232 - protein, 177 aa, Synthetic construct
ERVKGIAFMEFIRPIPTWDEWPEFARETFQAFRTTDVGRKLIIDQNVFIEGTLPMGVVRPLTEVEMDHYREPFLNPVDREPLWRFPNELPIAGEPANIVALVEEYMDWLHQSPVPKLLFWGTPGVLIPPAEAARLAKSLPNCKAVDIGPGLNLLQEDNPDLIGSEIARWLSTLEISG

SEQ ID NO: 233 - protein, 120 aa, Synthetic construct
MAEIGTGFPFDPHYVEVLGERMHYVDVGPRDGTPVLFLHGNPTSSYVWRNIIPHVAPTHRCIAPDLIGMGKSDKPDLGYFFDDHVRFMDAFIEALGLEEVVLVIHDWGSALGFHWAKRNP

SEQ ID NO: 234 - protein, 176 aa, Synthetic construct
RVKGIAFMEFIRPIPTWDEWPEFARETFQAFRTTDVGRKLIIDQNVFIEGTLPMGVVRPLTEVEMDHYREPFLNPVDREPLWRFPNELPIAGEPANIVALVEEYMDWLHQSPVPKLLFWGTPGVLIPPAEAARLAKSLPNCKAVDIGPGLNLLQEDNPDLIGSEIARWLSTLEISG

SEQ ID NO: 235 - protein, 121 aa, Synthetic construct
MAEIGTGFPFDPHYVEVLGERMHYVDVGPRDGTPVLFLHGNPTSSYVWRNIIPHVAPTHRCIAPDLIGMGKSDKPDLGYFFDDHVRFMDAFIEALGLEEVVLVIHDWGSALGFHWAKRNPE

SEQ ID NO: 236 - protein, 175 aa, Synthetic construct
VKGIAFMEFIRPIPTWDEWPEFARETFQAFRTTDVGRKLIIDQNVFIEGTLPMGVVRPLTEVEMDHYREPFLNPVDREPLWRFPNELPIAGEPANIVALVEEYMDWLHQSPVPKLLFWGTPGVLIPPAEAARLAKSLPNCKAVDIGPGLNLLQEDNPDLIGSEIARWLSTLEISG

SEQ ID NO: 237 - protein, 122 aa, Synthetic construct
MAEIGTGFPFDPHYVEVLGERMHYVDVGPRDGTPVLFLHGNPTSSYVWRNIIPHVAPTHRCIAPDLIGMGKSDKPDLGYFFDDHVRFMDAFIEALGLEEVVLVIHDWGSALGFHWAKRNPER

SEQ ID NO: 238 - protein, 174 aa, Synthetic construct
KGIAFMEFIRPIPTWDEWPEFARETFQAFRTTDVGRKLIIDQNVFIEGTLPMGVVRPLTEVEMDHYREPFLNPVDREPLWRFPNELPIAGEPANIVALVEEYMDWLHQSPVPKLLFWGTPGVLIPPAEAARLAKSLPNCKAVDIGPGLNLLQEDNPDLIGSEIARWLSTLEISG

SEQ ID NO: 239 - protein, 123 aa, Synthetic construct
MAEIGTGFPFDPHYVEVLGERMHYVDVGPRDGTPVLFLHGNPTSSYVWRNIIPHVAPTHRCIAPDLIGMGKSDKPDLGYFFDDHVRFMDAFIEALGLEEVVLVIHDWGSALGFHWAKRNPERV

SEQ ID NO: 240 - protein, 173 aa, Synthetic construct
GIAFMEFIRPIPTWDEWPEFARETFQAFRTTDVGRKLIIDQNVFIEGTLPMGVVRPLTEVEMDHYREPFLNPVDREPLWRFPNELPIAGEPANIVALVEEYMDWLHQSPVPKLLFWGTPGVLIPPAEAARLAKSLPNCKAVDIGPGLNLLQEDNPDLIGSEIARWLSTLEISG

SEQ ID NO: 241 - protein, 124 aa, Synthetic construct
MAEIGTGFPFDPHYVEVLGERMHYVDVGPRDGTPVLFLHGNPTSSYVWRNIIPHVAPTHRCIAPDLIGMGKSDKPDLGYFFDDHVRFMDAFIEALGLEEVVLVIHDWGSALGFHWAKRNPERVK

SEQ ID NO: 242 - protein, 172 aa, Synthetic construct
IAFMEFIRPIPTWDEWPEFARETFQAFRTTDVGRKLIIDQNVFIEGTLPMGVVRPLTEVEMDHYREPFLNPVDREPLWRFPNELPIAGEPANIVALVEEYMDWLHQSPVPKLLFWGTPGVLIPPAEAARLAKSLPNCKAVDIGPGLNLLQEDNPDLIGSEIARWLSTLEISG

SEQ ID NO: 243 - protein, 125 aa, Synthetic construct
MAEIGTGFPFDPHYVEVLGERMHYVDVGPRDGTPVLFLHGNPTSSYVWRNIIPHVAPTHRCIAPDLIGMGKSDKPDLGYFFDDHVRFMDAFIEALGLEEVVLVIHDWGSALGFHWAKRNPERVKG

SEQ ID NO: 244 - protein, 171 aa, Synthetic construct
AFMEFIRPIPTWDEWPEFARETFQAFRTTDVGRKLIIDQNVFIEGTLPMGVVRPLTEVEMDHYREPFLNPVDREPLWRFPNELPIAGEPANIVALVEEYMDWLHQSPVPKLLFWGTPGVLIPPAEAARLAKSLPNCKAVDIGPGLNLLQEDNPDLIGSEIARWLSTLEISG

SEQ ID NO: 245 - protein, 126 aa, Synthetic construct
MAEIGTGFPFDPHYVEVLGERMHYVDVGPRDGTPVLFLHGNPTSSYVWRNIIPHVAPTHRCIAPDLIGMGKSDKPDLGYFFDDHVRFMDAFIEALGLEEVVLVIHDWGSALGFHWAKRNPERVKGI

SEQ ID NO: 246 - protein, 170 aa, Synthetic construct
FMEFIRPIPTWDEWPEFARETFQAFRTTDVGRKLIIDQNVFIEGTLPMGVVRPLTEVEMDHYREPFLNPVDREPLWRFPNELPIAGEPANIVALVEEYMDWLHQSPVPKLLFWGTPGVLIPPAEAARLAKSLPNCKAVDIGPGLNLLQEDNPDLIGSEIARWLSTLEISG

SEQ ID NO: 247 - protein, 127 aa, Synthetic construct
MAEIGTGFPFDPHYVEVLGERMHYVDVGPRDGTPVLFLHGNPTSSYVWRNIIPHVAPTHRCIAPDLIGMGKSDKPDLGYFFDDHVRFMDAFIEALGLEEVVLVIHDWGSALGFHWAKRNPERVKGIA

SEQ ID NO: 248 - protein, 169 aa, Synthetic construct
MEFIRPIPTWDEWPEFARETFQAFRTTDVGRKLIIDQNVFIEGTLPMGVVRPLTEVEMDHYREPFLNPVDREPLWRFPNELPIAGEPANIVALVEEYMDWLHQSPVPKLLFWGTPGVLIPPAEAARLAKSLPNCKAVDIGPGLNLLQEDNPDLIGSEIARWLSTLEISG

SEQ ID NO: 249 - protein, 128 aa, Synthetic construct
MAEIGTGFPFDPHYVEVLGERMHYVDVGPRDGTPVLFLHGNPTSSYVWRNIIPHVAPTHRCIAPDLIGMGKSDKPDLGYFFDDHVRFMDAFIEALGLEEVVLVIHDWGSALGFHWAKRNPERVKGIAF

SEQ ID NO: 250 - protein, 168 aa, Synthetic construct
EFIRPIPTWDEWPEFARETFQAFRTTDVGRKLIIDQNVFIEGTLPMGVVRPLTEVEMDHYREPFLNPVDREPLWRFPNELPIAGEPANIVALVEEYMDWLHQSPVPKLLFWGTPGVLIPPAEAARLAKSLPNCKAVDIGPGLNLLQEDNPDLIGSEIARWLSTLEISG

SEQ ID NO: 251 - protein, 129 aa, Synthetic construct
MAEIGTGFPFDPHYVEVLGERMHYVDVGPRDGTPVLFLHGNPTSSYVWRNIIPHVAPTHRCIAPDLIGMGKSDKPDLGYFFDDHVRFMDAFIEALGLEEVVLVIHDWGSALGFHWAKRNPERVKGIAFM

SEQ ID NO: 252 - protein, 167 aa, Synthetic construct
FIRPIPTWDEWPEFARETFQAFRTTDVGRKLIIDQNVFIEGTLPMGVVRPLTEVEMDHYREPFLNPVDREPLWRFPNELPIAGEPANIVALVEEYMDWLHQSPVPKLLFWGTPGVLIPPAEAARLAKSLPNCKAVDIGPGLNLLQEDNPDLIGSEIARWLSTLEISG

SEQ ID NO: 253 - protein, 130 aa, Synthetic construct
MAEIGTGFPFDPHYVEVLGERMHYVDVGPRDGTPVLFLHGNPTSSYVWRNIIPHVAPTHRCIAPDLIGMGKSDKPDLGYFFDDHVRFMDAFIEALGLEEVVLVIHDWGSALGFHWAKRNPERVKGIAFME

SEQ ID NO: 254 - protein, 166 aa, Synthetic construct
IRPIPTWDEWPEFARETFQAFRTTDVGRKLIIDQNVFIEGTLPMGVVRPLTEVEMDHYREPFLNPVDREPLWRFPNELPIAGEPANIVALVEEYMDWLHQSPVPKLLFWGTPGVLIPPAEAARLAKSLPNCKAVDIGPGLNLLQEDNPDLIGSEIARWLSTLEISG

SEQ ID NO: 255 - protein, 131 aa, Synthetic construct
MAEIGTGFPFDPHYVEVLGERMHYVDVGPRDGTPVLFLHGNPTSSYVWRNIIPHVAPTHRCIAPDLIGMGKSDKPDLGYFFDDHVRFMDAFIEALGLEEVVLVIHDWGSALGFHWAKRNPERVKGIAFMEF

SEQ ID NO: 256 - protein, 165 aa, Synthetic construct
RPIPTWDEWPEFARETFQAFRTTDVGRKLIIDQNVFIEGTLPMGVVRPLTEVEMDHYREPFLNPVDREPLWRFPNELPIAGEPANIVALVEEYMDWLHQSPVPKLLFWGTPGVLIPPAEAARLAKSLPNCKAVDIGPGLNLLQEDNPDLIGSEIARWLSTLEISG

SEQ ID NO: 257 - protein, 132 aa, Synthetic construct
MAEIGTGFPFDPHYVEVLGERMHYVDVGPRDGTPVLFLHGNPTSSYVWRNIIPHVAPTHRCIAPDLIGMGKSDKPDLGYFFDDHVRFMDAFIEALGLEEVVLVIHDWGSALGFHWAKRNPERVKGIAFMEFI

SEQ ID NO: 258 - protein, 164 aa, Synthetic construct
PIPTWDEWPEFARETFQAFRTTDVGRKLIIDQNVFIEGTLPMGVVRPLTEVEMDHYREPFLNPVDREPLWRFPNELPIAGEPANIVALVEEYMDWLHQSPVPKLLFWGTPGVLIPPAEAARLAKSLPNCKAVDIGPGLNLLQEDNPDLIGSEIARWLSTLEISG

SEQ ID NO: 259 - protein, 133 aa, Synthetic construct
MAEIGTGFPFDPHYVEVLGERMHYVDVGPRDGTPVLFLHGNPTSSYVWRNIIPHVAPTHRCIAPDLIGMGKSDKPDLGYFFDDHVRFMDAFIEALGLEEVVLVIHDWGSALGFHWAKRNPERVKGIAFMEFIR

SEQ ID NO: 260 - protein, 163 aa, Synthetic construct
IPTWDEWPEFARETFQAFRTTDVGRKLIIDQNVFIEGTLPMGVVRPLTEVEMDHYREPFLNPVDREPLWRFPNELPIAGEPANIVALVEEYMDWLHQSPVPKLLFWGTPGVLIPPAEAARLAKSLPNCKAVDIGPGLNLLQEDNPDLIGSEIARWLSTLEISG

SEQ ID NO: 261 - protein, 134 aa, Synthetic construct
MAEIGTGFPFDPHYVEVLGERMHYVDVGPRDGTPVLFLHGNPTSSYVWRNIIPHVAPTHRCIAPDLIGMGKSDKPDLGYFFDDHVRFMDAFIEALGLEEVVLVIHDWGSALGFHWAKRNPERVKGIAFMEFIRP

SEQ ID NO: 262 - protein, 162 aa, Synthetic construct
PTWDEWPEFARETFQAFRTTDVGRKLIIDQNVFIEGTLPMGVVRPLTEVEMDHYREPFLNPVDREPLWRFPNELPIAGEPANIVALVEEYMDWLHQSPVPKLLFWGTPGVLIPPAEAARLAKSLPNCKAVDIGPGLNLLQEDNPDLIGSEIARWLSTLEISG

SEQ ID NO: 263 - protein, 135 aa, Synthetic construct
MAEIGTGFPFDPHYVEVLGERMHYVDVGPRDGTPVLFLHGNPTSSYVWRNIIPHVAPTHRCIAPDLIGMGKSDKPDLGYFFDDHVRFMDAFIEALGLEEVVLVIHDWGSALGFHWAKRNPERVKGIAFMEFIRPI

SEQ ID NO: 264 - protein, 161 aa, Synthetic construct
TWDEWPEFARETFQAFRTTDVGRKLIIDQNVFIEGTLPMGVVRPLTEVEMDHYREPFLNPVDREPLWRFPNELPIAGEPANIVALVEEYMDWLHQSPVPKLLFWGTPGVLIPPAEAARLAKSLPNCKAVDIGPGLNLLQEDNPDLIGSEIARWLSTLEISG

SEQ ID NO: 265 - protein, 136 aa, Synthetic construct
MAEIGTGFPFDPHYVEVLGERMHYVDVGPRDGTPVLFLHGNPTSSYVWRNIIPHVAPTHRCIAPDLIGMGKSDKPDLGYFFDDHVRFMDAFIEALGLEEVVLVIHDWGSALGFHWAKRNPERVKGIAFMEFIRPIP

SEQ ID NO: 266 - protein, 160 aa, Synthetic construct
WDEWPEFARETFQAFRTTDVGRKLIIDQNVFIEGTLPMGVVRPLTEVEMDHYREPFLNPVDREPLWRFPNELPIAGEPANIVALVEEYMDWLHQSPVPKLLFWGTPGVLIPPAEAARLAKSLPNCKAVDIGPGLNLLQEDNPDLIGSEIARWLSTLEISG

SEQ ID NO: 267 - protein, 137 aa, Synthetic construct
MAEIGTGFPFDPHYVEVLGERMHYVDVGPRDGTPVLFLHGNPTSSYVWRNIIPHVAPTHRCIAPDLIGMGKSDKPDLGYFFDDHVRFMDAFIEALGLEEVVLVIHDWGSALGFHWAKRNPERVKGIAFMEFIRPIPT

SEQ ID NO: 268 - protein, 159 aa, Synthetic construct
DEWPEFARETFQAFRTTDVGRKLIIDQNVFIEGTLPMGVVRPLTEVEMDHYREPFLNPVDREPLWRFPNELPIAGEPANIVALVEEYMDWLHQSPVPKLLFWGTPGVLIPPAEAARLAKSLPNCKAVDIGPGLNLLQEDNPDLIGSEIARWLSTLEISG

SEQ ID NO: 269 - protein, 138 aa, Synthetic construct
MAEIGTGFPFDPHYVEVLGERMHYVDVGPRDGTPVLFLHGNPTSSYVWRNIIPHVAPTHRCIAPDLIGMGKSDKPDLGYFFDDHVRFMDAFIEALGLEEVVLVIHDWGSALGFHWAKRNPERVKGIAFMEFIRPIPTW

SEQ ID NO: 270 - protein, 158 aa, Synthetic construct
EWPEFARETFQAFRTTDVGRKLIIDQNVFIEGTLPMGVVRPLTEVEMDHYREPFLNPVDREPLWRFPNELPIAGEPANIVALVEEYMDWLHQSPVPKLLFWGTPGVLIPPAEAARLAKSLPNCKAVDIGPGLNLLQEDNPDLIGSEIARWLSTLEISG

SEQ ID NO: 271 - protein, 139 aa, Synthetic construct
MAEIGTGFPFDPHYVEVLGERMHYVDVGPRDGTPVLFLHGNPTSSYVWRNIIPHVAPTHRCIAPDLIGMGKSDKPDLGYFFDDHVRFMDAFIEALGLEEVVLVIHDWGSALGFHWAKRNPERVKGIAFMEFIRPIPTWD

SEQ ID NO: 272 - protein, 157 aa, Synthetic construct
WPEFARETFQAFRTTDVGRKLIIDQNVFIEGTLPMGVVRPLTEVEMDHYREPFLNPVDREPLWRFPNELPIAGEPANIVALVEEYMDWLHQSPVPKLLFWGTPGVLIPPAEAARLAKSLPNCKAVDIGPGLNLLQEDNPDLIGSEIARWLSTLEISG

SEQ ID NO: 273 - protein, 140 aa, Synthetic construct
MAEIGTGFPFDPHYVEVLGERMHYVDVGPRDGTPVLFLHGNPTSSYVWRNIIPHVAPTHRCIAPDLIGMGKSDKPDLGYFFDDHVRFMDAFIEALGLEEVVLVIHDWGSALGFHWAKRNPERVKGIAFMEFIRPIPTWDE

SEQ ID NO: 274 - protein, 156 aa, Synthetic construct
PEFARETFQAFRTTDVGRKLIIDQNVFIEGTLPMGVVRPLTEVEMDHYREPFLNPVDREPLWRFPNELPIAGEPANIVALVEEYMDWLHQSPVPKLLFWGTPGVLIPPAEAARLAKSLPNCKAVDIGPGLNLLQEDNPDLIGSEIARWLSTLEISG

SEQ ID NO: 275 - protein, 141 aa, Synthetic construct
MAEIGTGFPFDPHYVEVLGERMHYVDVGPRDGTPVLFLHGNPTSSYVWRNIIPHVAPTHRCIAPDLIGMGKSDKPDLGYFFDDHVRFMDAFIEALGLEEVVLVIHDWGSALGFHWAKRNPERVKGIAFMEFIRPIPTWDEW

SEQ ID NO: 276 - protein, 155 aa, Synthetic construct
EFARETFQAFRTTDVGRKLIIDQNVFIEGTLPMGVVRPLTEVEMDHYREPFLNPVDREPLWRFPNELPIAGEPANIVALVEEYMDWLHQSPVPKLLFWGTPGVLIPPAEAARLAKSLPNCKAVDIGPGLNLLQEDNPDLIGSEIARWLSTLEISG

SEQ ID NO: 277 - protein, 142 aa, Synthetic construct
MAEIGTGFPFDPHYVEVLGERMHYVDVGPRDGTPVLFLHGNPTSSYVWRNIIPHVAPTHRCIAPDLIGMGKSDKPDLGYFFDDHVRFMDAFIEALGLEEVVLVIHDWGSALGFHWAKRNPERVKGIAFMEFIRPIPTWDEWP

SEQ ID NO: 278 - protein, 154 aa, Synthetic construct
FARETFQAFRTTDVGRKLIIDQNVFIEGTLPMGVVRPLTEVEMDHYREPFLNPVDREPLWRFPNELPIAGEPANIVALVEEYMDWLHQSPVPKLLFWGTPGVLIPPAEAARLAKSLPNCKAVDIGPGLNLLQEDNPDLIGSEIARWLSTLEISG

SEQ ID NO: 279 - protein, 143 aa, Synthetic construct
MAEIGTGFPFDPHYVEVLGERMHYVDVGPRDGTPVLFLHGNPTSSYVWRNIIPHVAPTHRCIAPDLIGMGKSDKPDLGYFFDDHVRFMDAFIEALGLEEVVLVIHDWGSALGFHWAKRNPERVKGIAFMEFIRPIPTWDEWPE

SEQ ID NO: 280 - protein, 153 aa, Synthetic construct
ARETFQAFRTTDVGRKLIIDQNVFIEGTLPMGVVRPLTEVEMDHYREPFLNPVDREPLWRFPNELPIAGEPANIVALVEEYMDWLHQSPVPKLLFWGTPGVLIPPAEAARLAKSLPNCKAVDIGPGLNLLQEDNPDLIGSEIARWLSTLEISG

SEQ ID NO: 281 - protein, 144 aa, Synthetic construct
MAEIGTGFPFDPHYVEVLGERMHYVDVGPRDGTPVLFLHGNPTSSYVWRNIIPHVAPTHRCIAPDLIGMGKSDKPDLGYFFDDHVRFMDAFIEALGLEEVVLVIHDWGSALGFHWAKRNPERVKGIAFMEFIRPIPTWDEWPEF

SEQ ID NO: 282 - protein, 152 aa, Synthetic construct
RETFQAFRTTDVGRKLIIDQNVFIEGTLPMGVVRPLTEVEMDHYREPFLNPVDREPLWRFPNELPIAGEPANIVALVEEYMDWLHQSPVPKLLFWGTPGVLIPPAEAARLAKSLPNCKAVDIGPGLNLLQEDNPDLIGSEIARWLSTLEISG

SEQ ID NO: 283 - protein, 145 aa, Synthetic construct
MAEIGTGFPFDPHYVEVLGERMHYVDVGPRDGTPVLFLHGNPTSSYVWRNIIPHVAPTHRCIAPDLIGMGKSDKPDLGYFFDDHVRFMDAFIEALGLEEVVLVIHDWGSALGFHWAKRNPERVKGIAFMEFIRPIPTWDEWPEFA

SEQ ID NO: 284 - protein, 151 aa, Synthetic construct
ETFQAFRTTDVGRKLIIDQNVFIEGTLPMGVVRPLTEVEMDHYREPFLNPVDREPLWRFPNELPIAGEPANIVALVEEYMDWLHQSPVPKLLFWGTPGVLIPPAEAARLAKSLPNCKAVDIGPGLNLLQEDNPDLIGSEIARWLSTLEISG

SEQ ID NO: 285 - protein, 146 aa, Synthetic construct
MAEIGTGFPFDPHYVEVLGERMHYVDVGPRDGTPVLFLHGNPTSSYVWRNIIPHVAPTHRCIAPDLIGMGKSDKPDLGYFFDDHVRFMDAFIEALGLEEVVLVIHDWGSALGFHWAKRNPERVKGIAFMEFIRPIPTWDEWPEFAR

SEQ ID NO: 286 - protein, 150 aa, Synthetic construct
TFQAFRTTDVGRKLIIDQNVFIEGTLPMGVVRPLTEVEMDHYREPFLNPVDREPLWRFPNELPIAGEPANIVALVEEYMDWLHQSPVPKLLFWGTPGVLIPPAEAARLAKSLPNCKAVDIGPGLNLLQEDNPDLIGSEIARWLSTLEISG

SEQ ID NO: 287 - protein, 147 aa, Synthetic construct
MAEIGTGFPFDPHYVEVLGERMHYVDVGPRDGTPVLFLHGNPTSSYVWRNIIPHVAPTHRCIAPDLIGMGKSDKPDLGYFFDDHVRFMDAFIEALGLEEVVLVIHDWGSALGFHWAKRNPERVKGIAFMEFIRPIPTWDEWPEFARE

SEQ ID NO: 288 - protein, 149 aa, Synthetic construct
FQAFRTTDVGRKLIIDQNVFIEGTLPMGVVRPLTEVEMDHYREPFLNPVDREPLWRFPNELPIAGEPANIVALVEEYMDWLHQSPVPKLLFWGTPGVLIPPAEAARLAKSLPNCKAVDIGPGLNLLQEDNPDLIGSEIARWLSTLEISG

SEQ ID NO: 289 - protein, 148 aa, Synthetic construct
MAEIGTGFPFDPHYVEVLGERMHYVDVGPRDGTPVLFLHGNPTSSYVWRNIIPHVAPTHRCIAPDLIGMGKSDKPDLGYFFDDHVRFMDAFIEALGLEEVVLVIHDWGSALGFHWAKRNPERVKGIAFMEFIRPIPTWDEWPEFARET

SEQ ID NO: 290 - protein, 148 aa, Synthetic construct
QAFRTTDVGRKLIIDQNVFIEGTLPMGVVRPLTEVEMDHYREPFLNPVDREPLWRFPNELPIAGEPANIVALVEEYMDWLHQSPVPKLLFWGTPGVLIPPAEAARLAKSLPNCKAVDIGPGLNLLQEDNPDLIGSEIARWLSTLEISG

SEQ ID NO: 291 - protein, 149 aa, Synthetic construct
MAEIGTGFPFDPHYVEVLGERMHYVDVGPRDGTPVLFLHGNPTSSYVWRNIIPHVAPTHRCIAPDLIGMGKSDKPDLGYFFDDHVRFMDAFIEALGLEEVVLVIHDWGSALGFHWAKRNPERVKGIAFMEFIRPIPTWDEWPEFARETF

SEQ ID NO: 292 - protein, 147 aa, Synthetic construct
AFRTTDVGRKLIIDQNVFIEGTLPMGVVRPLTEVEMDHYREPFLNPVDREPLWRFPNELPIAGEPANIVALVEEYMDWLHQSPVPKLLFWGTPGVLIPPAEAARLAKSLPNCKAVDIGPGLNLLQEDNPDLIGSEIARWLSTLEISG

SEQ ID NO: 293 - protein, 150 aa, Synthetic construct
MAEIGTGFPFDPHYVEVLGERMHYVDVGPRDGTPVLFLHGNPTSSYVWRNIIPHVAPTHRCIAPDLIGMGKSDKPDLGYFFDDHVRFMDAFIEALGLEEVVLVIHDWGSALGFHWAKRNPERVKGIAFMEFIRPIPTWDEWPEFARETFQ

SEQ ID NO: 294 - protein, 146 aa, Synthetic construct
FRTTDVGRKLIIDQNVFIEGTLPMGVVRPLTEVEMDHYREPFLNPVDREPLWRFPNELPIAGEPANIVALVEEYMDWLHQSPVPKLLFWGTPGVLIPPAEAARLAKSLPNCKAVDIGPGLNLLQEDNPDLIGSEIARWLSTLEISG

SEQ ID NO: 295 - protein, 151 aa, Synthetic construct
MAEIGTGFPFDPHYVEVLGERMHYVDVGPRDGTPVLFLHGNPTSSYVWRNIIPHVAPTHRCIAPDLIGMGKSDKPDLGYFFDDHVRFMDAFIEALGLEEVVLVIHDWGSALGFHWAKRNPERVKGIAFMEFIRPIPTWDEWPEFARETFQA

SEQ ID NO: 296 - protein, 145 aa, Synthetic construct
RTTDVGRKLIIDQNVFIEGTLPMGVVRPLTEVEMDHYREPFLNPVDREPLWRFPNELPIAGEPANIVALVEEYMDWLHQSPVPKLLFWGTPGVLIPPAEAARLAKSLPNCKAVDIGPGLNLLQEDNPDLIGSEIARWLSTLEISG

SEQ ID NO: 297 - protein, 152 aa, Synthetic construct
MAEIGTGFPFDPHYVEVLGERMHYVDVGPRDGTPVLFLHGNPTSSYVWRNIIPHVAPTHRCIAPDLIGMGKSDKPDLGYFFDDHVRFMDAFIEALGLEEVVLVIHDWGSALGFHWAKRNPERVKGIAFMEFIRPIPTWDEWPEFARETFQAF

SEQ ID NO: 298 - protein, 144 aa, Synthetic construct
TTDVGRKLIIDQNVFIEGTLPMGVVRPLTEVEMDHYREPFLNPVDREPLWRFPNELPIAGEPANIVALVEEYMDWLHQSPVPKLLFWGTPGVLIPPAEAARLAKSLPNCKAVDIGPGLNLLQEDNPDLIGSEIARWLSTLEISG

SEQ ID NO: 299 - protein, 153 aa, Synthetic construct
MAEIGTGFPFDPHYVEVLGERMHYVDVGPRDGTPVLFLHGNPTSSYVWRNIIPHVAPTHRCIAPDLIGMGKSDKPDLGYFFDDHVRFMDAFIEALGLEEVVLVIHDWGSALGFHWAKRNPERVKGIAFMEFIRPIPTWDEWPEFARETFQAFR

SEQ ID NO: 300 - protein, 143 aa, Synthetic construct
TDVGRKLIIDQNVFIEGTLPMGVVRPLTEVEMDHYREPFLNPVDREPLWRFPNELPIAGEPANIVALVEEYMDWLHQSPVPKLLFWGTPGVLIPPAEAARLAKSLPNCKAVDIGPGLNLLQEDNPDLIGSEIARWLSTLEISG

SEQ ID NO: 301 - protein, 154 aa, Synthetic construct
MAEIGTGFPFDPHYVEVLGERMHYVDVGPRDGTPVLFLHGNPTSSYVWRNIIPHVAPTHRCIAPDLIGMGKSDKPDLGYFFDDHVRFMDAFIEALGLEEVVLVIHDWGSALGFHWAKRNPERVKGIAFMEFIRPIPTWDEWPEFARETFQAFRT

SEQ ID NO: 302 - protein, 142 aa, Synthetic construct
DVGRKLIIDQNVFIEGTLPMGVVRPLTEVEMDHYREPFLNPVDREPLWRFPNELPIAGEPANIVALVEEYMDWLHQSPVPKLLFWGTPGVLIPPAEAARLAKSLPNCKAVDIGPGLNLLQEDNPDLIGSEIARWLSTLEISG

SEQ ID NO: 303 - protein, 155 aa, Synthetic construct
MAEIGTGFPFDPHYVEVLGERMHYVDVGPRDGTPVLFLHGNPTSSYVWRNIIPHVAPTHRCIAPDLIGMGKSDKPDLGYFFDDHVRFMDAFIEALGLEEVVLVIHDWGSALGFHWAKRNPERVKGIAFMEFIRPIPTWDEWPEFARETFQAFRTT

SEQ ID NO: 304 - protein, 141 aa, Synthetic construct
VGRKLIIDQNVFIEGTLPMGVVRPLTEVEMDHYREPFLNPVDREPLWRFPNELPIAGEPANIVALVEEYMDWLHQSPVPKLLFWGTPGVLIPPAEAARLAKSLPNCKAVDIGPGLNLLQEDNPDLIGSEIARWLSTLEISG

SEQ ID NO: 305 - protein, 156 aa, Synthetic construct
MAEIGTGFPFDPHYVEVLGERMHYVDVGPRDGTPVLFLHGNPTSSYVWRNIIPHVAPTHRCIAPDLIGMGKSDKPDLGYFFDDHVRFMDAFIEALGLEEVVLVIHDWGSALGFHWAKRNPERVKGIAFMEFIRPIPTWDEWPEFARETFQAFRTTD

SEQ ID NO: 306 - protein, 140 aa, Synthetic construct
GRKLIIDQNVFIEGTLPMGVVRPLTEVEMDHYREPFLNPVDREPLWRFPNELPIAGEPANIVALVEEYMDWLHQSPVPKLLFWGTPGVLIPPAEAARLAKSLPNCKAVDIGPGLNLLQEDNPDLIGSEIARWLSTLEISG

SEQ ID NO: 307 - protein, 157 aa, Synthetic construct
MAEIGTGFPFDPHYVEVLGERMHYVDVGPRDGTPVLFLHGNPTSSYVWRNIIPHVAPTHRCIAPDLIGMGKSDKPDLGYFFDDHVRFMDAFIEALGLEEVVLVIHDWGSALGFHWAKRNPERVKGIAFMEFIRPIPTWDEWPEFARETFQAFRTTDV

SEQ ID NO: 308 - protein, 139 aa, Synthetic construct
RKLIIDQNVFIEGTLPMGVVRPLTEVEMDHYREPFLNPVDREPLWRFPNELPIAGEPANIVALVEEYMDWLHQSPVPKLLFWGTPGVLIPPAEAARLAKSLPNCKAVDIGPGLNLLQEDNPDLIGSEIARWLSTLEISG

SEQ ID NO: 309 - protein, 158 aa, Synthetic construct
MAEIGTGFPFDPHYVEVLGERMHYVDVGPRDGTPVLFLHGNPTSSYVWRNIIPHVAPTHRCIAPDLIGMGKSDKPDLGYFFDDHVRFMDAFIEALGLEEVVLVIHDWGSALGFHWAKRNPERVKGIAFMEFIRPIPTWDEWPEFARETFQAFRTTDVG

SEQ ID NO: 310 - protein, 138 aa, Synthetic construct
KLIIDQNVFIEGTLPMGVVRPLTEVEMDHYREPFLNPVDREPLWRFPNELPIAGEPANIVALVEEYMDWLHQSPVPKLLFWGTPGVLIPPAEAARLAKSLPNCKAVDIGPGLNLLQEDNPDLIGSEIARWLSTLEISG

SEQ ID NO: 311 - protein, 159 aa, Synthetic construct
MAEIGTGFPFDPHYVEVLGERMHYVDVGPRDGTPVLFLHGNPTSSYVWRNIIPHVAPTHRCIAPDLIGMGKSDKPDLGYFFDDHVRFMDAFIEALGLEEVVLVIHDWGSALGFHWAKRNPERVKGIAFMEFIRPIPTWDEWPEFARETFQAFRTTDVGR

SEQ ID NO: 312 - protein, 137 aa, Synthetic construct
LIIDQNVFIEGTLPMGVVRPLTEVEMDHYREPFLNPVDREPLWRFPNELPIAGEPANIVALVEEYMDWLHQSPVPKLLFWGTPGVLIPPAEAARLAKSLPNCKAVDIGPGLNLLQEDNPDLIGSEIARWLSTLEISG

SEQ ID NO: 313 - protein, 160 aa, Synthetic construct
MAEIGTGFPFDPHYVEVLGERMHYVDVGPRDGTPVLFLHGNPTSSYVWRNIIPHVAPTHRCIAPDLIGMGKSDKPDLGYFFDDHVRFMDAFIEALGLEEVVLVIHDWGSALGFHWAKRNPERVKGIAFMEFIRPIPTWDEWPEFARETFQAFRTTDVGRK

SEQ ID NO: 314 - protein, 136 aa, Synthetic construct
IIDQNVFIEGTLPMGVVRPLTEVEMDHYREPFLNPVDREPLWRFPNELPIAGEPANIVALVEEYMDWLHQSPVPKLLFWGTPGVLIPPAEAARLAKSLPNCKAVDIGPGLNLLQEDNPDLIGSEIARWLSTLEISG

SEQ ID NO: 315 - protein, 161 aa, Synthetic construct
MAEIGTGFPFDPHYVEVLGERMHYVDVGPRDGTPVLFLHGNPTSSYVWRNIIPHVAPTHRCIAPDLIGMGKSDKPDLGYFFDDHVRFMDAFIEALGLEEVVLVIHDWGSALGFHWAKRNPERVKGIAFMEFIRPIPTWDEWPEFARETFQAFRTTDVGRKL

SEQ ID NO: 316 - protein, 135 aa, Synthetic construct
IDQNVFIEGTLPMGVVRPLTEVEMDHYREPFLNPVDREPLWRFPNELPIAGEPANIVALVEEYMDWLHQSPVPKLLFWGTPGVLIPPAEAARLAKSLPNCKAVDIGPGLNLLQEDNPDLIGSEIARWLSTLEISG

SEQ ID NO: 317 - protein, 162 aa, Synthetic construct
MAEIGTGFPFDPHYVEVLGERMHYVDVGPRDGTPVLFLHGNPTSSYVWRNIIPHVAPTHRCIAPDLIGMGKSDKPDLGYFFDDHVRFMDAFIEALGLEEVVLVIHDWGSALGFHWAKRNPERVKGIAFMEFIRPIPTWDEWPEFARETFQAFRTTDVGRKLI

SEQ ID NO: 318 - protein, 134 aa, Synthetic construct
DQNVFIEGTLPMGVVRPLTEVEMDHYREPFLNPVDREPLWRFPNELPIAGEPANIVALVEEYMDWLHQSPVPKLLFWGTPGVLIPPAEAARLAKSLPNCKAVDIGPGLNLLQEDNPDLIGSEIARWLSTLEISG

SEQ ID NO: 319 - protein, 163 aa, Synthetic construct
MAEIGTGFPFDPHYVEVLGERMHYVDVGPRDGTPVLFLHGNPTSSYVWRNIIPHVAPTHRCIAPDLIGMGKSDKPDLGYFFDDHVRFMDAFIEALGLEEVVLVIHDWGSALGFHWAKRNPERVKGIAFMEFIRPIPTWDEWPEFARETFQAFRTTDVGRKLII

SEQ ID NO: 320 - protein, 133 aa, Synthetic construct
QNVFIEGTLPMGVVRPLTEVEMDHYREPFLNPVDREPLWRFPNELPIAGEPANIVALVEEYMDWLHQSPVPKLLFWGTPGVLIPPAEAARLAKSLPNCKAVDIGPGLNLLQEDNPDLIGSEIARWLSTLEISG

SEQ ID NO: 321 - protein, 164 aa, Synthetic construct
MAEIGTGFPFDPHYVEVLGERMHYVDVGPRDGTPVLFLHGNPTSSYVWRNIIPHVAPTHRCIAPDLIGMGKSDKPDLGYFFDDHVRFMDAFIEALGLEEVVLVIHDWGSALGFHWAKRNPERVKGIAFMEFIRPIPTWDEWPEFARETFQAFRTTDVGRKLIID

SEQ ID NO: 322 - protein, 132 aa, Synthetic construct
NVFIEGTLPMGVVRPLTEVEMDHYREPFLNPVDREPLWRFPNELPIAGEPANIVALVEEYMDWLHQSPVPKLLFWGTPGVLIPPAEAARLAKSLPNCKAVDIGPGLNLLQEDNPDLIGSEIARWLSTLEISG

SEQ ID NO: 323 - protein, 165 aa, Synthetic construct
MAEIGTGFPFDPHYVEVLGERMHYVDVGPRDGTPVLFLHGNPTSSYVWRNIIPHVAPTHRCIAPDLIGMGKSDKPDLGYFFDDHVRFMDAFIEALGLEEVVLVIHDWGSALGFHWAKRNPERVKGIAFMEFIRPIPTWDEWPEFARETFQAFRTTDVGRKLIIDQ

SEQ ID NO: 324 - protein, 131 aa, Synthetic construct
VFIEGTLPMGVVRPLTEVEMDHYREPFLNPVDREPLWRFPNELPIAGEPANIVALVEEYMDWLHQSPVPKLLFWGTPGVLIPPAEAARLAKSLPNCKAVDIGPGLNLLQEDNPDLIGSEIARWLSTLEISG

SEQ ID NO: 325 - protein, 166 aa, Synthetic construct
MAEIGTGFPFDPHYVEVLGERMHYVDVGPRDGTPVLFLHGNPTSSYVWRNIIPHVAPTHRCIAPDLIGMGKSDKPDLGYFFDDHVRFMDAFIEALGLEEVVLVIHDWGSALGFHWAKRNPERVKGIAFMEFIRPIPTWDEWPEFARETFQAFRTTDVGRKLIIDQN

SEQ ID NO: 326 - protein, 130 aa, Synthetic construct
FIEGTLPMGVVRPLTEVEMDHYREPFLNPVDREPLWRFPNELPIAGEPANIVALVEEYMDWLHQSPVPKLLFWGTPGVLIPPAEAARLAKSLPNCKAVDIGPGLNLLQEDNPDLIGSEIARWLSTLEISG

SEQ ID NO: 327 - protein, 167 aa, Synthetic construct
MAEIGTGFPFDPHYVEVLGERMHYVDVGPRDGTPVLFLHGNPTSSYVWRNIIPHVAPTHRCIAPDLIGMGKSDKPDLGYFFDDHVRFMDAFIEALGLEEVVLVIHDWGSALGFHWAKRNPERVKGIAFMEFIRPIPTWDEWPEFARETFQAFRTTDVGRKLIIDQNV

SEQ ID NO: 328 - protein, 129 aa, Synthetic construct
IEGTLPMGVVRPLTEVEMDHYREPFLNPVDREPLWRFPNELPIAGEPANIVALVEEYMDWLHQSPVPKLLFWGTPGVLIPPAEAARLAKSLPNCKAVDIGPGLNLLQEDNPDLIGSEIARWLSTLEISG

SEQ ID NO: 329 - protein, 168 aa, Synthetic construct
MAEIGTGFPFDPHYVEVLGERMHYVDVGPRDGTPVLFLHGNPTSSYVWRNIIPHVAPTHRCIAPDLIGMGKSDKPDLGYFFDDHVRFMDAFIEALGLEEVVLVIHDWGSALGFHWAKRNPERVKGIAFMEFIRPIPTWDEWPEFARETFQAFRTTDVGRKLIIDQNVF

SEQ ID NO: 330 - protein, 128 aa, Synthetic construct
EGTLPMGVVRPLTEVEMDHYREPFLNPVDREPLWRFPNELPIAGEPANIVALVEEYMDWLHQSPVPKLLFWGTPGVLIPPAEAARLAKSLPNCKAVDIGPGLNLLQEDNPDLIGSEIARWLSTLEISG

SEQ ID NO: 331 - protein, 169 aa, Synthetic construct
MAEIGTGFPFDPHYVEVLGERMHYVDVGPRDGTPVLFLHGNPTSSYVWRNIIPHVAPTHRCIAPDLIGMGKSDKPDLGYFFDDHVRFMDAFIEALGLEEVVLVIHDWGSALGFHWAKRNPERVKGIAFMEFIRPIPTWDEWPEFARETFQAFRTTDVGRKLIIDQNVFI

SEQ ID NO: 332 - protein, 127 aa, Synthetic construct
GTLPMGVVRPLTEVEMDHYREPFLNPVDREPLWRFPNELPIAGEPANIVALVEEYMDWLHQSPVPKLLFWGTPGVLIPPAEAARLAKSLPNCKAVDIGPGLNLLQEDNPDLIGSEIARWLSTLEISG

SEQ ID NO: 333 - protein, 170 aa, Synthetic construct
MAEIGTGFPFDPHYVEVLGERMHYVDVGPRDGTPVLFLHGNPTSSYVWRNIIPHVAPTHRCIAPDLIGMGKSDKPDLGYFFDDHVRFMDAFIEALGLEEVVLVIHDWGSALGFHWAKRNPERVKGIAFMEFIRPIPTWDEWPEFARETFQAFRTTDVGRKLIIDQNVFIE

SEQ ID NO: 334 - protein, 126 aa, Synthetic construct
TLPMGVVRPLTEVEMDHYREPFLNPVDREPLWRFPNELPIAGEPANIVALVEEYMDWLHQSPVPKLLFWGTPGVLIPPAEAARLAKSLPNCKAVDIGPGLNLLQEDNPDLIGSEIARWLSTLEISG

SEQ ID NO: 335 - protein, 171 aa, Synthetic construct
MAEIGTGFPFDPHYVEVLGERMHYVDVGPRDGTPVLFLHGNPTSSYVWRNIIPHVAPTHRCIAPDLIGMGKSDKPDLGYFFDDHVRFMDAFIEALGLEEVVLVIHDWGSALGFHWAKRNPERVKGIAFMEFIRPIPTWDEWPEFARETFQAFRTTDVGRKLIIDQNVFIEG

SEQ ID NO: 336 - protein, 125 aa, Synthetic construct
LPMGVVRPLTEVEMDHYREPFLNPVDREPLWRFPNELPIAGEPANIVALVEEYMDWLHQSPVPKLLFWGTPGVLIPPAEAARLAKSLPNCKAVDIGPGLNLLQEDNPDLIGSEIARWLSTLEISG

SEQ ID NO: 337 - protein, 172 aa, Synthetic construct
MAEIGTGFPFDPHYVEVLGERMHYVDVGPRDGTPVLFLHGNPTSSYVWRNIIPHVAPTHRCIAPDLIGMGKSDKPDLGYFFDDHVRFMDAFIEALGLEEVVLVIHDWGSALGFHWAKRNPERVKGIAFMEFIRPIPTWDEWPEFARETFQAFRTTDVGRKLIIDQNVFIEGT

SEQ ID NO: 338 - protein, 124 aa, Synthetic construct
PMGVVRPLTEVEMDHYREPFLNPVDREPLWRFPNELPIAGEPANIVALVEEYMDWLHQSPVPKLLFWGTPGVLIPPAEAARLAKSLPNCKAVDIGPGLNLLQEDNPDLIGSEIARWLSTLEISG

SEQ ID NO: 339 - protein, 173 aa, Synthetic construct
MAEIGTGFPFDPHYVEVLGERMHYVDVGPRDGTPVLFLHGNPTSSYVWRNIIPHVAPTHRCIAPDLIGMGKSDKPDLGYFFDDHVRFMDAFIEALGLEEVVLVIHDWGSALGFHWAKRNPERVKGIAFMEFIRPIPTWDEWPEFARETFQAFRTTDVGRKLIIDQNVFIEGTL

SEQ ID NO: 340 - protein, 123 aa, Synthetic construct
MGVVRPLTEVEMDHYREPFLNPVDREPLWRFPNELPIAGEPANIVALVEEYMDWLHQSPVPKLLFWGTPGVLIPPAEAARLAKSLPNCKAVDIGPGLNLLQEDNPDLIGSEIARWLSTLEISG

SEQ ID NO: 341 - protein, 174 aa, Synthetic construct
MAEIGTGFPFDPHYVEVLGERMHYVDVGPRDGTPVLFLHGNPTSSYVWRNIIPHVAPTHRCIAPDLIGMGKSDKPDLGYFFDDHVRFMDAFIEALGLEEVVLVIHDWGSALGFHWAKRNPERVKGIAFMEFIRPIPTWDEWPEFARETFQAFRTTDVGRKLIIDQNVFIEGTLP

SEQ ID NO: 342 - protein, 122 aa, Synthetic construct
GVVRPLTEVEMDHYREPFLNPVDREPLWRFPNELPIAGEPANIVALVEEYMDWLHQSPVPKLLFWGTPGVLIPPAEAARLAKSLPNCKAVDIGPGLNLLQEDNPDLIGSEIARWLSTLEISG

SEQ ID NO: 343 - protein, 175 aa, Synthetic construct
MAEIGTGFPFDPHYVEVLGERMHYVDVGPRDGTPVLFLHGNPTSSYVWRNIIPHVAPTHRCIAPDLIGMGKSDKPDLGYFFDDHVRFMDAFIEALGLEEVVLVIHDWGSALGFHWAKRNPERVKGIAFMEFIRPIPTWDEWPEFARETFQAFRTTDVGRKLIIDQNVFIEGTLPM

SEQ ID NO: 344 - protein, 121 aa, Synthetic construct
VVRPLTEVEMDHYREPFLNPVDREPLWRFPNELPIAGEPANIVALVEEYMDWLHQSPVPKLLFWGTPGVLIPPAEAARLAKSLPNCKAVDIGPGLNLLQEDNPDLIGSEIARWLSTLEISG

SEQ ID NO: 345 - protein, 176 aa, Synthetic construct
MAEIGTGFPFDPHYVEVLGERMHYVDVGPRDGTPVLFLHGNPTSSYVWRNIIPHVAPTHRCIAPDLIGMGKSDKPDLGYFFDDHVRFMDAFIEALGLEEVVLVIHDWGSALGFHWAKRNPERVKGIAFMEFIRPIPTWDEWPEFARETFQAFRTTDVGRKLIIDQNVFIEGTLPMG

SEQ ID NO: 346 - protein, 120 aa, Synthetic construct
VRPLTEVEMDHYREPFLNPVDREPLWRFPNELPIAGEPANIVALVEEYMDWLHQSPVPKLLFWGTPGVLIPPAEAARLAKSLPNCKAVDIGPGLNLLQEDNPDLIGSEIARWLSTLEISG

SEQ ID NO: 347 - protein, 177 aa, Synthetic construct
MAEIGTGFPFDPHYVEVLGERMHYVDVGPRDGTPVLFLHGNPTSSYVWRNIIPHVAPTHRCIAPDLIGMGKSDKPDLGYFFDDHVRFMDAFIEALGLEEVVLVIHDWGSALGFHWAKRNPERVKGIAFMEFIRPIPTWDEWPEFARETFQAFRTTDVGRKLIIDQNVFIEGTLPMGV

SEQ ID NO: 348 - protein, 119 aa, Synthetic construct
RPLTEVEMDHYREPFLNPVDREPLWRFPNELPIAGEPANIVALVEEYMDWLHQSPVPKLLFWGTPGVLIPPAEAARLAKSLPNCKAVDIGPGLNLLQEDNPDLIGSEIARWLSTLEISG

SEQ ID NO: 349 - protein, 178 aa, Synthetic construct
MAEIGTGFPFDPHYVEVLGERMHYVDVGPRDGTPVLFLHGNPTSSYVWRNIIPHVAPTHRCIAPDLIGMGKSDKPDLGYFFDDHVRFMDAFIEALGLEEVVLVIHDWGSALGFHWAKRNPERVKGIAFMEFIRPIPTWDEWPEFARETFQAFRTTDVGRKLIIDQNVFIEGTLPMGVV

SEQ ID NO: 350 - protein, 118 aa, Synthetic construct
PLTEVEMDHYREPFLNPVDREPLWRFPNELPIAGEPANIVALVEEYMDWLHQSPVPKLLFWGTPGVLIPPAEAARLAKSLPNCKAVDIGPGLNLLQEDNPDLIGSEIARWLSTLEISG

SEQ ID NO: 351 - protein, 179 aa, Synthetic construct
MAEIGTGFPFDPHYVEVLGERMHYVDVGPRDGTPVLFLHGNPTSSYVWRNIIPHVAPTHRCIAPDLIGMGKSDKPDLGYFFDDHVRFMDAFIEALGLEEVVLVIHDWGSALGFHWAKRNPERVKGIAFMEFIRPIPTWDEWPEFARETFQAFRTTDVGRKLIIDQNVFIEGTLPMGVVR

SEQ ID NO: 352 - protein, 117 aa, Synthetic construct
LTEVEMDHYREPFLNPVDREPLWRFPNELPIAGEPANIVALVEEYMDWLHQSPVPKLLFWGTPGVLIPPAEAARLAKSLPNCKAVDIGPGLNLLQEDNPDLIGSEIARWLSTLEISG

SEQ ID NO: 353 - protein, 180 aa, Synthetic construct
MAEIGTGFPFDPHYVEVLGERMHYVDVGPRDGTPVLFLHGNPTSSYVWRNIIPHVAPTHRCIAPDLIGMGKSDKPDLGYFFDDHVRFMDAFIEALGLEEVVLVIHDWGSALGFHWAKRNPERVKGIAFMEFIRPIPTWDEWPEFARETFQAFRTTDVGRKLIIDQNVFIEGTLPMGVVRP

SEQ ID NO: 354 - protein, 116 aa, Synthetic construct
TEVEMDHYREPFLNPVDREPLWRFPNELPIAGEPANIVALVEEYMDWLHQSPVPKLLFWGTPGVLIPPAEAARLAKSLPNCKAVDIGPGLNLLQEDNPDLIGSEIARWLSTLEISG

SEQ ID NO: 355 - protein, 181 aa, Synthetic construct
MAEIGTGFPFDPHYVEVLGERMHYVDVGPRDGTPVLFLHGNPTSSYVWRNIIPHVAPTHRCIAPDLIGMGKSDKPDLGYFFDDHVRFMDAFIEALGLEEVVLVIHDWGSALGFHWAKRNPERVKGIAFMEFIRPIPTWDEWPEFARETFQAFRTTDVGRKLIIDQNVFIEGTLPMGVVRPL

SEQ ID NO: 356 - protein, 115 aa, Synthetic construct
EVEMDHYREPFLNPVDREPLWRFPNELPIAGEPANIVALVEEYMDWLHQSPVPKLLFWGTPGVLIPPAEAARLAKSLPNCKAVDIGPGLNLLQEDNPDLIGSEIARWLSTLEISG

SEQ ID NO: 357 - protein, 182 aa, Synthetic construct
MAEIGTGFPFDPHYVEVLGERMHYVDVGPRDGTPVLFLHGNPTSSYVWRNIIPHVAPTHRCIAPDLIGMGKSDKPDLGYFFDDHVRFMDAFIEALGLEEVVLVIHDWGSALGFHWAKRNPERVKGIAFMEFIRPIPTWDEWPEFARETFQAFRTTDVGRKLIIDQNVFIEGTLPMGVVRPLT

SEQ ID NO: 358 - protein, 114 aa, Synthetic construct
VEMDHYREPFLNPVDREPLWRFPNELPIAGEPANIVALVEEYMDWLHQSPVPKLLFWGTPGVLIPPAEAARLAKSLPNCKAVDIGPGLNLLQEDNPDLIGSEIARWLSTLEISG

SEQ ID NO: 359 - protein, 183 aa, Synthetic construct
MAEIGTGFPFDPHYVEVLGERMHYVDVGPRDGTPVLFLHGNPTSSYVWRNIIPHVAPTHRCIAPDLIGMGKSDKPDLGYFFDDHVRFMDAFIEALGLEEVVLVIHDWGSALGFHWAKRNPERVKGIAFMEFIRPIPTWDEWPEFARETFQAFRTTDVGRKLIIDQNVFIEGTLPMGVVRPLTE

SEQ ID NO: 360 - protein, 113 aa, Synthetic construct
EMDHYREPFLNPVDREPLWRFPNELPIAGEPANIVALVEEYMDWLHQSPVPKLLFWGTPGVLIPPAEAARLAKSLPNCKAVDIGPGLNLLQEDNPDLIGSEIARWLSTLEISG

SEQ ID NO: 361 - protein, 184 aa, Synthetic construct
MAEIGTGFPFDPHYVEVLGERMHYVDVGPRDGTPVLFLHGNPTSSYVWRNIIPHVAPTHRCIAPDLIGMGKSDKPDLGYFFDDHVRFMDAFIEALGLEEVVLVIHDWGSALGFHWAKRNPERVKGIAFMEFIRPIPTWDEWPEFARETFQAFRTTDVGRKLIIDQNVFIEGTLPMGVVRPLTEV

SEQ ID NO: 362 - protein, 112 aa, Synthetic construct
MDHYREPFLNPVDREPLWRFPNELPIAGEPANIVALVEEYMDWLHQSPVPKLLFWGTPGVLIPPAEAARLAKSLPNCKAVDIGPGLNLLQEDNPDLIGSEIARWLSTLEISG

SEQ ID NO: 363 - protein, 185 aa, Synthetic construct
MAEIGTGFPFDPHYVEVLGERMHYVDVGPRDGTPVLFLHGNPTSSYVWRNIIPHVAPTHRCIAPDLIGMGKSDKPDLGYFFDDHVRFMDAFIEALGLEEVVLVIHDWGSALGFHWAKRNPERVKGIAFMEFIRPIPTWDEWPEFARETFQAFRTTDVGRKLIIDQNVFIEGTLPMGVVRPLTEVE

SEQ ID NO: 364 - protein, 111 aa, Synthetic construct
DHYREPFLNPVDREPLWRFPNELPIAGEPANIVALVEEYMDWLHQSPVPKLLFWGTPGVLIPPAEAARLAKSLPNCKAVDIGPGLNLLQEDNPDLIGSEIARWLSTLEISG

SEQ ID NO: 365 - protein, 186 aa, Synthetic construct
MAEIGTGFPFDPHYVEVLGERMHYVDVGPRDGTPVLFLHGNPTSSYVWRNIIPHVAPTHRCIAPDLIGMGKSDKPDLGYFFDDHVRFMDAFIEALGLEEVVLVIHDWGSALGFHWAKRNPERVKGIAFMEFIRPIPTWDEWPEFARETFQAFRTTDVGRKLIIDQNVFIEGTLPMGVVRPLTEVEM

SEQ ID NO: 366 - protein, 110 aa, Synthetic construct
HYREPFLNPVDREPLWRFPNELPIAGEPANIVALVEEYMDWLHQSPVPKLLFWGTPGVLIPPAEAARLAKSLPNCKAVDIGPGLNLLQEDNPDLIGSEIARWLSTLEISG

SEQ ID NO: 367 - protein, 187 aa, Synthetic construct
MAEIGTGFPFDPHYVEVLGERMHYVDVGPRDGTPVLFLHGNPTSSYVWRNIIPHVAPTHRCIAPDLIGMGKSDKPDLGYFFDDHVRFMDAFIEALGLEEVVLVIHDWGSALGFHWAKRNPERVKGIAFMEFIRPIPTWDEWPEFARETFQAFRTTDVGRKLIIDQNVFIEGTLPMGVVRPLTEVEMD

SEQ ID NO: 368 - protein, 109 aa, Synthetic construct
YREPFLNPVDREPLWRFPNELPIAGEPANIVALVEEYMDWLHQSPVPKLLFWGTPGVLIPPAEAARLAKSLPNCKAVDIGPGLNLLQEDNPDLIGSEIARWLSTLEISG

SEQ ID NO: 369 - protein, 188 aa, Synthetic construct
MAEIGTGFPFDPHYVEVLGERMHYVDVGPRDGTPVLFLHGNPTSSYVWRNIIPHVAPTHRCIAPDLIGMGKSDKPDLGYFFDDHVRFMDAFIEALGLEEVVLVIHDWGSALGFHWAKRNPERVKGIAFMEFIRPIPTWDEWPEFARETFQAFRTTDVGRKLIIDQNVFIEGTLPMGVVRPLTEVEMDH

SEQ ID NO: 370 - protein, 108 aa, Synthetic construct
REPFLNPVDREPLWRFPNELPIAGEPANIVALVEEYMDWLHQSPVPKLLFWGTPGVLIPPAEAARLAKSLPNCKAVDIGPGLNLLQEDNPDLIGSEIARWLSTLEISG

SEQ ID NO: 371 - protein, 189 aa, Synthetic construct
MAEIGTGFPFDPHYVEVLGERMHYVDVGPRDGTPVLFLHGNPTSSYVWRNIIPHVAPTHRCIAPDLIGMGKSDKPDLGYFFDDHVRFMDAFIEALGLEEVVLVIHDWGSALGFHWAKRNPERVKGIAFMEFIRPIPTWDEWPEFARETFQAFRTTDVGRKLIIDQNVFIEGTLPMGVVRPLTEVEMDHY

SEQ ID NO: 372 - protein, 107 aa, Synthetic construct
EPFLNPVDREPLWRFPNELPIAGEPANIVALVEEYMDWLHQSPVPKLLFWGTPGVLIPPAEAARLAKSLPNCKAVDIGPGLNLLQEDNPDLIGSEIARWLSTLEISG

SEQ ID NO: 373 - protein, 190 aa, Synthetic construct
MAEIGTGFPFDPHYVEVLGERMHYVDVGPRDGTPVLFLHGNPTSSYVWRNIIPHVAPTHRCIAPDLIGMGKSDKPDLGYFFDDHVRFMDAFIEALGLEEVVLVIHDWGSALGFHWAKRNPERVKGIAFMEFIRPIPTWDEWPEFARETFQAFRTTDVGRKLIIDQNVFIEGTLPMGVVRPLTEVEMDHYR

SEQ ID NO: 374 - protein, 106 aa, Synthetic construct
PFLNPVDREPLWRFPNELPIAGEPANIVALVEEYMDWLHQSPVPKLLFWGTPGVLIPPAEAARLAKSLPNCKAVDIGPGLNLLQEDNPDLIGSEIARWLSTLEISG

SEQ ID NO: 375 - protein, 191 aa, Synthetic construct
MAEIGTGFPFDPHYVEVLGERMHYVDVGPRDGTPVLFLHGNPTSSYVWRNIIPHVAPTHRCIAPDLIGMGKSDKPDLGYFFDDHVRFMDAFIEALGLEEVVLVIHDWGSALGFHWAKRNPERVKGIAFMEFIRPIPTWDEWPEFARETFQAFRTTDVGRKLIIDQNVFIEGTLPMGVVRPLTEVEMDHYRE

SEQ ID NO: 376 - protein, 105 aa, Synthetic construct
FLNPVDREPLWRFPNELPIAGEPANIVALVEEYMDWLHQSPVPKLLFWGTPGVLIPPAEAARLAKSLPNCKAVDIGPGLNLLQEDNPDLIGSEIARWLSTLEISG

SEQ ID NO: 377 - protein, 192 aa, Synthetic construct
MAEIGTGFPFDPHYVEVLGERMHYVDVGPRDGTPVLFLHGNPTSSYVWRNIIPHVAPTHRCIAPDLIGMGKSDKPDLGYFFDDHVRFMDAFIEALGLEEVVLVIHDWGSALGFHWAKRNPERVKGIAFMEFIRPIPTWDEWPEFARETFQAFRTTDVGRKLIIDQNVFIEGTLPMGVVRPLTEVEMDHYREP

SEQ ID NO: 378 - protein, 104 aa, Synthetic construct
LNPVDREPLWRFPNELPIAGEPANIVALVEEYMDWLHQSPVPKLLFWGTPGVLIPPAEAARLAKSLPNCKAVDIGPGLNLLQEDNPDLIGSEIARWLSTLEISG

SEQ ID NO: 379 - protein, 193 aa, Synthetic construct
MAEIGTGFPFDPHYVEVLGERMHYVDVGPRDGTPVLFLHGNPTSSYVWRNIIPHVAPTHRCIAPDLIGMGKSDKPDLGYFFDDHVRFMDAFIEALGLEEVVLVIHDWGSALGFHWAKRNPERVKGIAFMEFIRPIPTWDEWPEFARETFQAFRTTDVGRKLIIDQNVFIEGTLPMGVVRPLTEVEMDHYREPF

SEQ ID NO: 380 - protein, 103 aa, Synthetic construct
NPVDREPLWRFPNELPIAGEPANIVALVEEYMDWLHQSPVPKLLFWGTPGVLIPPAEAARLAKSLPNCKAVDIGPGLNLLQEDNPDLIGSEIARWLSTLEISG

SEQ ID NO: 381 - protein, 194 aa, Synthetic construct
MAEIGTGFPFDPHYVEVLGERMHYVDVGPRDGTPVLFLHGNPTSSYVWRNIIPHVAPTHRCIAPDLIGMGKSDKPDLGYFFDDHVRFMDAFIEALGLEEVVLVIHDWGSALGFHWAKRNPERVKGIAFMEFIRPIPTWDEWPEFARETFQAFRTTDVGRKLIIDQNVFIEGTLPMGVVRPLTEVEMDHYREPFL

SEQ ID NO: 382 - protein, 102 aa, Synthetic construct
PVDREPLWRFPNELPIAGEPANIVALVEEYMDWLHQSPVPKLLFWGTPGVLIPPAEAARLAKSLPNCKAVDIGPGLNLLQEDNPDLIGSEIARWLSTLEISG

SEQ ID NO: 383 - protein, 195 aa, Synthetic construct
MAEIGTGFPFDPHYVEVLGERMHYVDVGPRDGTPVLFLHGNPTSSYVWRNIIPHVAPTHRCIAPDLIGMGKSDKPDLGYFFDDHVRFMDAFIEALGLEEVVLVIHDWGSALGFHWAKRNPERVKGIAFMEFIRPIPTWDEWPEFARETFQAFRTTDVGRKLIIDQNVFIEGTLPMGVVRPLTEVEMDHYREPFLN

SEQ ID NO: 384 - protein, 101 aa, Synthetic construct
VDREPLWRFPNELPIAGEPANIVALVEEYMDWLHQSPVPKLLFWGTPGVLIPPAEAARLAKSLPNCKAVDIGPGLNLLQEDNPDLIGSEIARWLSTLEISG

SEQ ID NO: 385 - protein, 196 aa, Synthetic construct
MAEIGTGFPFDPHYVEVLGERMHYVDVGPRDGTPVLFLHGNPTSSYVWRNIIPHVAPTHRCIAPDLIGMGKSDKPDLGYFFDDHVRFMDAFIEALGLEEVVLVIHDWGSALGFHWAKRNPERVKGIAFMEFIRPIPTWDEWPEFARETFQAFRTTDVGRKLIIDQNVFIEGTLPMGVVRPLTEVEMDHYREPFLNP

SEQ ID NO: 386 - protein, 100 aa, Synthetic construct
DREPLWRFPNELPIAGEPANIVALVEEYMDWLHQSPVPKLLFWGTPGVLIPPAEAARLAKSLPNCKAVDIGPGLNLLQEDNPDLIGSEIARWLSTLEISG

SEQ ID NO: 387 - protein, 197 aa, Synthetic construct
MAEIGTGFPFDPHYVEVLGERMHYVDVGPRDGTPVLFLHGNPTSSYVWRNIIPHVAPTHRCIAPDLIGMGKSDKPDLGYFFDDHVRFMDAFIEALGLEEVVLVIHDWGSALGFHWAKRNPERVKGIAFMEFIRPIPTWDEWPEFARETFQAFRTTDVGRKLIIDQNVFIEGTLPMGVVRPLTEVEMDHYREPFLNPV

SEQ ID NO: 388 - protein, 99 aa, Synthetic construct
REPLWRFPNELPIAGEPANIVALVEEYMDWLHQSPVPKLLFWGTPGVLIPPAEAARLAKSLPNCKAVDIGPGLNLLQEDNPDLIGSEIARWLSTLEISG

SEQ ID NO: 389 - protein, 198 aa, Synthetic construct
MAEIGTGFPFDPHYVEVLGERMHYVDVGPRDGTPVLFLHGNPTSSYVWRNIIPHVAPTHRCIAPDLIGMGKSDKPDLGYFFDDHVRFMDAFIEALGLEEVVLVIHDWGSALGFHWAKRNPERVKGIAFMEFIRPIPTWDEWPEFARETFQAFRTTDVGRKLIIDQNVFIEGTLPMGVVRPLTEVEMDHYREPFLNPVD

SEQ ID NO: 390 - protein, 98 aa, Synthetic construct
EPLWRFPNELPIAGEPANIVALVEEYMDWLHQSPVPKLLFWGTPGVLIPPAEAARLAKSLPNCKAVDIGPGLNLLQEDNPDLIGSEIARWLSTLEISG

SEQ ID NO: 391 - protein, 199 aa, Synthetic construct
MAEIGTGFPFDPHYVEVLGERMHYVDVGPRDGTPVLFLHGNPTSSYVWRNIIPHVAPTHRCIAPDLIGMGKSDKPDLGYFFDDHVRFMDAFIEALGLEEVVLVIHDWGSALGFHWAKRNPERVKGIAFMEFIRPIPTWDEWPEFARETFQAFRTTDVGRKLIIDQNVFIEGTLPMGVVRPLTEVEMDHYREPFLNPVDR

SEQ ID NO: 392 - protein, 97 aa, Synthetic construct
PLWRFPNELPIAGEPANIVALVEEYMDWLHQSPVPKLLFWGTPGVLIPPAEAARLAKSLPNCKAVDIGPGLNLLQEDNPDLIGSEIARWLSTLEISG

SEQ ID NO: 393 - protein, 200 aa, Synthetic construct
MAEIGTGFPFDPHYVEVLGERMHYVDVGPRDGTPVLFLHGNPTSSYVWRNIIPHVAPTHRCIAPDLIGMGKSDKPDLGYFFDDHVRFMDAFIEALGLEEVVLVIHDWGSALGFHWAKRNPERVKGIAFMEFIRPIPTWDEWPEFARETFQAFRTTDVGRKLIIDQNVFIEGTLPMGVVRPLTEVEMDHYREPFLNPVDRE

SEQ ID NO: 394 - protein, 96 aa, Synthetic construct
LWRFPNELPIAGEPANIVALVEEYMDWLHQSPVPKLLFWGTPGVLIPPAEAARLAKSLPNCKAVDIGPGLNLLQEDNPDLIGSEIARWLSTLEISG

SEQ ID NO: 395 - protein, 201 aa, Synthetic construct
MAEIGTGFPFDPHYVEVLGERMHYVDVGPRDGTPVLFLHGNPTSSYVWRNIIPHVAPTHRCIAPDLIGMGKSDKPDLGYFFDDHVRFMDAFIEALGLEEVVLVIHDWGSALGFHWAKRNPERVKGIAFMEFIRPIPTWDEWPEFARETFQAFRTTDVGRKLIIDQNVFIEGTLPMGVVRPLTEVEMDHYREPFLNPVDREP

SEQ ID NO: 396 - protein, 95 aa, Synthetic construct
WRFPNELPIAGEPANIVALVEEYMDWLHQSPVPKLLFWGTPGVLIPPAEAARLAKSLPNCKAVDIGPGLNLLQEDNPDLIGSEIARWLSTLEISG

SEQ ID NO: 397 - protein, 202 aa, Synthetic construct
MAEIGTGFPFDPHYVEVLGERMHYVDVGPRDGTPVLFLHGNPTSSYVWRNIIPHVAPTHRCIAPDLIGMGKSDKPDLGYFFDDHVRFMDAFIEALGLEEVVLVIHDWGSALGFHWAKRNPERVKGIAFMEFIRPIPTWDEWPEFARETFQAFRTTDVGRKLIIDQNVFIEGTLPMGVVRPLTEVEMDHYREPFLNPVDREPL

SEQ ID NO: 398 - protein, 94 aa, Synthetic construct
RFPNELPIAGEPANIVALVEEYMDWLHQSPVPKLLFWGTPGVLIPPAEAARLAKSLPNCKAVDIGPGLNLLQEDNPDLIGSEIARWLSTLEISG

SEQ ID NO: 399 - protein, 203 aa, Synthetic construct
MAEIGTGFPFDPHYVEVLGERMHYVDVGPRDGTPVLFLHGNPTSSYVWRNIIPHVAPTHRCIAPDLIGMGKSDKPDLGYFFDDHVRFMDAFIEALGLEEVVLVIHDWGSALGFHWAKRNPERVKGIAFMEFIRPIPTWDEWPEFARETFQAFRTTDVGRKLIIDQNVFIEGTLPMGVVRPLTEVEMDHYREPFLNPVDREPLW

SEQ ID NO: 400 - protein, 93 aa, Synthetic construct
FPNELPIAGEPANIVALVEEYMDWLHQSPVPKLLFWGTPGVLIPPAEAARLAKSLPNCKAVDIGPGLNLLQEDNPDLIGSEIARWLSTLEISG

SEQ ID NO: 401 - protein, 204 aa, Synthetic construct
MAEIGTGFPFDPHYVEVLGERMHYVDVGPRDGTPVLFLHGNPTSSYVWRNIIPHVAPTHRCIAPDLIGMGKSDKPDLGYFFDDHVRFMDAFIEALGLEEVVLVIHDWGSALGFHWAKRNPERVKGIAFMEFIRPIPTWDEWPEFARETFQAFRTTDVGRKLIIDQNVFIEGTLPMGVVRPLTEVEMDHYREPFLNPVDREPLWR

SEQ ID NO: 402 - protein, 92 aa, Synthetic construct
PNELPIAGEPANIVALVEEYMDWLHQSPVPKLLFWGTPGVLIPPAEAARLAKSLPNCKAVDIGPGLNLLQEDNPDLIGSEIARWLSTLEISG

SEQ ID NO: 403 - protein, 205 aa, Synthetic construct
MAEIGTGFPFDPHYVEVLGERMHYVDVGPRDGTPVLFLHGNPTSSYVWRNIIPHVAPTHRCIAPDLIGMGKSDKPDLGYFFDDHVRFMDAFIEALGLEEVVLVIHDWGSALGFHWAKRNPERVKGIAFMEFIRPIPTWDEWPEFARETFQAFRTTDVGRKLIIDQNVFIEGTLPMGVVRPLTEVEMDHYREPFLNPVDREPLWRF

SEQ ID NO: 404 - protein, 91 aa, Synthetic construct
NELPIAGEPANIVALVEEYMDWLHQSPVPKLLFWGTPGVLIPPAEAARLAKSLPNCKAVDIGPGLNLLQEDNPDLIGSEIARWLSTLEISG

SEQ ID NO: 405 - protein, 206 aa, Synthetic construct
MAEIGTGFPFDPHYVEVLGERMHYVDVGPRDGTPVLFLHGNPTSSYVWRNIIPHVAPTHRCIAPDLIGMGKSDKPDLGYFFDDHVRFMDAFIEALGLEEVVLVIHDWGSALGFHWAKRNPERVKGIAFMEFIRPIPTWDEWPEFARETFQAFRTTDVGRKLIIDQNVFIEGTLPMGVVRPLTEVEMDHYREPFLNPVDREPLWRFP

SEQ ID NO: 406 - protein, 90 aa, Synthetic construct
ELPIAGEPANIVALVEEYMDWLHQSPVPKLLFWGTPGVLIPPAEAARLAKSLPNCKAVDIGPGLNLLQEDNPDLIGSEIARWLSTLEISG

SEQ ID NO: 407 - protein, 207 aa, Synthetic construct
MAEIGTGFPFDPHYVEVLGERMHYVDVGPRDGTPVLFLHGNPTSSYVWRNIIPHVAPTHRCIAPDLIGMGKSDKPDLGYFFDDHVRFMDAFIEALGLEEVVLVIHDWGSALGFHWAKRNPERVKGIAFMEFIRPIPTWDEWPEFARETFQAFRTTDVGRKLIIDQNVFIEGTLPMGVVRPLTEVEMDHYREPFLNPVDREPLWRFPN

SEQ ID NO: 408 - protein, 89 aa, Synthetic construct
LPIAGEPANIVALVEEYMDWLHQSPVPKLLFWGTPGVLIPPAEAARLAKSLPNCKAVDIGPGLNLLQEDNPDLIGSEIARWLSTLEISG

SEQ ID NO: 409 - protein, 208 aa, Synthetic construct
MAEIGTGFPFDPHYVEVLGERMHYVDVGPRDGTPVLFLHGNPTSSYVWRNIIPHVAPTHRCIAPDLIGMGKSDKPDLGYFFDDHVRFMDAFIEALGLEEVVLVIHDWGSALGFHWAKRNPERVKGIAFMEFIRPIPTWDEWPEFARETFQAFRTTDVGRKLIIDQNVFIEGTLPMGVVRPLTEVEMDHYREPFLNPVDREPLWRFPNE

SEQ ID NO: 410 - protein, 88 aa, Synthetic construct
PIAGEPANIVALVEEYMDWLHQSPVPKLLFWGTPGVLIPPAEAARLAKSLPNCKAVDIGPGLNLLQEDNPDLIGSEIARWLSTLEISG

SEQ ID NO: 411 - protein, 209 aa, Synthetic construct
MAEIGTGFPFDPHYVEVLGERMHYVDVGPRDGTPVLFLHGNPTSSYVWRNIIPHVAPTHRCIAPDLIGMGKSDKPDLGYFFDDHVRFMDAFIEALGLEEVVLVIHDWGSALGFHWAKRNPERVKGIAFMEFIRPIPTWDEWPEFARETFQAFRTTDVGRKLIIDQNVFIEGTLPMGVVRPLTEVEMDHYREPFLNPVDREPLWRFPNEL

SEQ ID NO: 412 - protein, 87 aa, Synthetic construct
IAGEPANIVALVEEYMDWLHQSPVPKLLFWGTPGVLIPPAEAARLAKSLPNCKAVDIGPGLNLLQEDNPDLIGSEIARWLSTLEISG

SEQ ID NO: 413 - protein, 210 aa, Synthetic construct
MAEIGTGFPFDPHYVEVLGERMHYVDVGPRDGTPVLFLHGNPTSSYVWRNIIPHVAPTHRCIAPDLIGMGKSDKPDLGYFFDDHVRFMDAFIEALGLEEVVLVIHDWGSALGFHWAKRNPERVKGIAFMEFIRPIPTWDEWPEFARETFQAFRTTDVGRKLIIDQNVFIEGTLPMGVVRPLTEVEMDHYREPFLNPVDREPLWRFPNELP

SEQ ID NO: 414 - protein, 86 aa, Synthetic construct
AGEPANIVALVEEYMDWLHQSPVPKLLFWGTPGVLIPPAEAARLAKSLPNCKAVDIGPGLNLLQEDNPDLIGSEIARWLSTLEISG

SEQ ID NO: 415 - protein, 211 aa, Synthetic construct
MAEIGTGFPFDPHYVEVLGERMHYVDVGPRDGTPVLFLHGNPTSSYVWRNIIPHVAPTHRCIAPDLIGMGKSDKPDLGYFFDDHVRFMDAFIEALGLEEVVLVIHDWGSALGFHWAKRNPERVKGIAFMEFIRPIPTWDEWPEFARETFQAFRTTDVGRKLIIDQNVFIEGTLPMGVVRPLTEVEMDHYREPFLNPVDREPLWRFPNELPI

SEQ ID NO: 416 - protein, 85 aa, Synthetic construct
GEPANIVALVEEYMDWLHQSPVPKLLFWGTPGVLIPPAEAARLAKSLPNCKAVDIGPGLNLLQEDNPDLIGSEIARWLSTLEISG

SEQ ID NO: 417 - protein, 212 aa, Synthetic construct
MAEIGTGFPFDPHYVEVLGERMHYVDVGPRDGTPVLFLHGNPTSSYVWRNIIPHVAPTHRCIAPDLIGMGKSDKPDLGYFFDDHVRFMDAFIEALGLEEVVLVIHDWGSALGFHWAKRNPERVKGIAFMEFIRPIPTWDEWPEFARETFQAFRTTDVGRKLIIDQNVFIEGTLPMGVVRPLTEVEMDHYREPFLNPVDREPLWRFPNELPIA

SEQ ID NO: 418 - protein, 84 aa, Synthetic construct
EPANIVALVEEYMDWLHQSPVPKLLFWGTPGVLIPPAEAARLAKSLPNCKAVDIGPGLNLLQEDNPDLIGSEIARWLSTLEISG

SEQ ID NO: 419 - protein, 213 aa, Synthetic construct
MAEIGTGFPFDPHYVEVLGERMHYVDVGPRDGTPVLFLHGNPTSSYVWRNIIPHVAPTHRCIAPDLIGMGKSDKPDLGYFFDDHVRFMDAFIEALGLEEVVLVIHDWGSALGFHWAKRNPERVKGIAFMEFIRPIPTWDEWPEFARETFQAFRTTDVGRKLIIDQNVFIEGTLPMGVVRPLTEVEMDHYREPFLNPVDREPLWRFPNELPIAG

SEQ ID NO: 420 - protein, 83 aa, Synthetic construct
PANIVALVEEYMDWLHQSPVPKLLFWGTPGVLIPPAEAARLAKSLPNCKAVDIGPGLNLLQEDNPDLIGSEIARWLSTLEISG

SEQ ID NO: 421 - protein, 214 aa, Synthetic construct
MAEIGTGFPFDPHYVEVLGERMHYVDVGPRDGTPVLFLHGNPTSSYVWRNIIPHVAPTHRCIAPDLIGMGKSDKPDLGYFFDDHVRFMDAFIEALGLEEVVLVIHDWGSALGFHWAKRNPERVKGIAFMEFIRPIPTWDEWPEFARETFQAFRTTDVGRKLIIDQNVFIEGTLPMGVVRPLTEVEMDHYREPFLNPVDREPLWRFPNELPIAGE

SEQ ID NO: 422 - protein, 82 aa, Synthetic construct
ANIVALVEEYMDWLHQSPVPKLLFWGTPGVLIPPAEAARLAKSLPNCKAVDIGPGLNLLQEDNPDLIGSEIARWLSTLEISG

SEQ ID NO: 423 - protein, 215 aa, Synthetic construct
MAEIGTGFPFDPHYVEVLGERMHYVDVGPRDGTPVLFLHGNPTSSYVWRNIIPHVAPTHRCIAPDLIGMGKSDKPDLGYFFDDHVRFMDAFIEALGLEEVVLVIHDWGSALGFHWAKRNPERVKGIAFMEFIRPIPTWDEWPEFARETFQAFRTTDVGRKLIIDQNVFIEGTLPMGVVRPLTEVEMDHYREPFLNPVDREPLWRFPNELPIAGEP

SEQ ID NO: 424 - protein, 81 aa, Synthetic construct
NIVALVEEYMDWLHQSPVPKLLFWGTPGVLIPPAEAARLAKSLPNCKAVDIGPGLNLLQEDNPDLIGSEIARWLSTLEISG

SEQ ID NO: 425 - protein, 216 aa, Synthetic construct
MAEIGTGFPFDPHYVEVLGERMHYVDVGPRDGTPVLFLHGNPTSSYVWRNIIPHVAPTHRCIAPDLIGMGKSDKPDLGYFFDDHVRFMDAFIEALGLEEVVLVIHDWGSALGFHWAKRNPERVKGIAFMEFIRPIPTWDEWPEFARETFQAFRTTDVGRKLIIDQNVFIEGTLPMGVVRPLTEVEMDHYREPFLNPVDREPLWRFPNELPIAGEPA

SEQ ID NO: 426 - protein, 80 aa, Synthetic construct
IVALVEEYMDWLHQSPVPKLLFWGTPGVLIPPAEAARLAKSLPNCKAVDIGPGLNLLQEDNPDLIGSEIARWLSTLEISG

SEQ ID NO: 427 - protein, 217 aa, Synthetic construct
MAEIGTGFPFDPHYVEVLGERMHYVDVGPRDGTPVLFLHGNPTSSYVWRNIIPHVAPTHRCIAPDLIGMGKSDKPDLGYFFDDHVRFMDAFIEALGLEEVVLVIHDWGSALGFHWAKRNPERVKGIAFMEFIRPIPTWDEWPEFARETFQAFRTTDVGRKLIIDQNVFIEGTLPMGVVRPLTEVEMDHYREPFLNPVDREPLWRFPNELPIAGEPAN

SEQ ID NO: 428 - protein, 79 aa, Synthetic construct
VALVEEYMDWLHQSPVPKLLFWGTPGVLIPPAEAARLAKSLPNCKAVDIGPGLNLLQEDNPDLIGSEIARWLSTLEISG

SEQ ID NO: 429 - protein, 218 aa, Synthetic construct
MAEIGTGFPFDPHYVEVLGERMHYVDVGPRDGTPVLFLHGNPTSSYVWRNIIPHVAPTHRCIAPDLIGMGKSDKPDLGYFFDDHVRFMDAFIEALGLEEVVLVIHDWGSALGFHWAKRNPERVKGIAFMEFIRPIPTWDEWPEFARETFQAFRTTDVGRKLIIDQNVFIEGTLPMGVVRPLTEVEMDHYREPFLNPVDREPLWRFPNELPIAGEPANI

SEQ ID NO: 430 - protein, 78 aa, Synthetic construct
ALVEEYMDWLHQSPVPKLLFWGTPGVLIPPAEAARLAKSLPNCKAVDIGPGLNLLQEDNPDLIGSEIARWLSTLEISG

SEQ ID NO: 431 - protein, 219 aa, Synthetic construct
MAEIGTGFPFDPHYVEVLGERMHYVDVGPRDGTPVLFLHGNPTSSYVWRNIIPHVAPTHRCIAPDLIGMGKSDKPDLGYFFDDHVRFMDAFIEALGLEEVVLVIHDWGSALGFHWAKRNPERVKGIAFMEFIRPIPTWDEWPEFARETFQAFRTTDVGRKLIIDQNVFIEGTLPMGVVRPLTEVEMDHYREPFLNPVDREPLWRFPNELPIAGEPANIV

SEQ ID NO: 432 - protein, 77 aa, Synthetic construct
LVEEYMDWLHQSPVPKLLFWGTPGVLIPPAEAARLAKSLPNCKAVDIGPGLNLLQEDNPDLIGSEIARWLSTLEISG

SEQ ID NO: 433 - protein, 220 aa, Synthetic construct
MAEIGTGFPFDPHYVEVLGERMHYVDVGPRDGTPVLFLHGNPTSSYVWRNIIPHVAPTHRCIAPDLIGMGKSDKPDLGYFFDDHVRFMDAFIEALGLEEVVLVIHDWGSALGFHWAKRNPERVKGIAFMEFIRPIPTWDEWPEFARETFQAFRTTDVGRKLIIDQNVFIEGTLPMGVVRPLTEVEMDHYREPFLNPVDREPLWRFPNELPIAGEPANIVA

SEQ ID NO: 434 - protein, 76 aa, Synthetic construct
VEEYMDWLHQSPVPKLLFWGTPGVLIPPAEAARLAKSLPNCKAVDIGPGLNLLQEDNPDLIGSEIARWLSTLEISG

SEQ ID NO: 435 - protein, 221 aa, Synthetic construct
MAEIGTGFPFDPHYVEVLGERMHYVDVGPRDGTPVLFLHGNPTSSYVWRNIIPHVAPTHRCIAPDLIGMGKSDKPDLGYFFDDHVRFMDAFIEALGLEEVVLVIHDWGSALGFHWAKRNPERVKGIAFMEFIRPIPTWDEWPEFARETFQAFRTTDVGRKLIIDQNVFIEGTLPMGVVRPLTEVEMDHYREPFLNPVDREPLWRFPNELPIAGEPANIVAL

SEQ ID NO: 436 - protein, 75 aa, Synthetic construct
EEYMDWLHQSPVPKLLFWGTPGVLIPPAEAARLAKSLPNCKAVDIGPGLNLLQEDNPDLIGSEIARWLSTLEISG

SEQ ID NO: 437 - protein, 222 aa, Synthetic construct
MAEIGTGFPFDPHYVEVLGERMHYVDVGPRDGTPVLFLHGNPTSSYVWRNIIPHVAPTHRCIAPDLIGMGKSDKPDLGYFFDDHVRFMDAFIEALGLEEVVLVIHDWGSALGFHWAKRNPERVKGIAFMEFIRPIPTWDEWPEFARETFQAFRTTDVGRKLIIDQNVFIEGTLPMGVVRPLTEVEMDHYREPFLNPVDREPLWRFPNELPIAGEPANIVALV

SEQ ID NO: 438 - protein, 74 aa, Synthetic construct
EYMDWLHQSPVPKLLFWGTPGVLIPPAEAARLAKSLPNCKAVDIGPGLNLLQEDNPDLIGSEIARWLSTLEISG

SEQ ID NO: 439 - protein, 223 aa, Synthetic construct
MAEIGTGFPFDPHYVEVLGERMHYVDVGPRDGTPVLFLHGNPTSSYVWRNIIPHVAPTHRCIAPDLIGMGKSDKPDLGYFFDDHVRFMDAFIEALGLEEVVLVIHDWGSALGFHWAKRNPERVKGIAFMEFIRPIPTWDEWPEFARETFQAFRTTDVGRKLIIDQNVFIEGTLPMGVVRPLTEVEMDHYREPFLNPVDREPLWRFPNELPIAGEPANIVALVE

SEQ ID NO: 440 - protein, 73 aa, Synthetic construct
YMDWLHQSPVPKLLFWGTPGVLIPPAEAARLAKSLPNCKAVDIGPGLNLLQEDNPDLIGSEIARWLSTLEISG

SEQ ID NO: 441 - protein, 224 aa, Synthetic construct
MAEIGTGFPFDPHYVEVLGERMHYVDVGPRDGTPVLFLHGNPTSSYVWRNIIPHVAPTHRCIAPDLIGMGKSDKPDLGYFFDDHVRFMDAFIEALGLEEVVLVIHDWGSALGFHWAKRNPERVKGIAFMEFIRPIPTWDEWPEFARETFQAFRTTDVGRKLIIDQNVFIEGTLPMGVVRPLTEVEMDHYREPFLNPVDREPLWRFPNELPIAGEPANIVALVEE

SEQ ID NO: 442 - protein, 72 aa, Synthetic construct
MDWLHQSPVPKLLFWGTPGVLIPPAEAARLAKSLPNCKAVDIGPGLNLLQEDNPDLIGSEIARWLSTLEISG

SEQ ID NO: 443 - protein, 225 aa, Synthetic construct
MAEIGTGFPFDPHYVEVLGERMHYVDVGPRDGTPVLFLHGNPTSSYVWRNIIPHVAPTHRCIAPDLIGMGKSDKPDLGYFFDDHVRFMDAFIEALGLEEVVLVIHDWGSALGFHWAKRNPERVKGIAFMEFIRPIPTWDEWPEFARETFQAFRTTDVGRKLIIDQNVFIEGTLPMGVVRPLTEVEMDHYREPFLNPVDREPLWRFPNELPIAGEPANIVALVEEY

SEQ ID NO: 444 - protein, 71 aa, Synthetic construct
DWLHQSPVPKLLFWGTPGVLIPPAEAARLAKSLPNCKAVDIGPGLNLLQEDNPDLIGSEIARWLSTLEISG

SEQ ID NO: 445 - protein, 226 aa, Synthetic construct
MAEIGTGFPFDPHYVEVLGERMHYVDVGPRDGTPVLFLHGNPTSSYVWRNIIPHVAPTHRCIAPDLIGMGKSDKPDLGYFFDDHVRFMDAFIEALGLEEVVLVIHDWGSALGFHWAKRNPERVKGIAFMEFIRPIPTWDEWPEFARETFQAFRTTDVGRKLIIDQNVFIEGTLPMGVVRPLTEVEMDHYREPFLNPVDREPLWRFPNELPIAGEPANIVALVEEYM

SEQ ID NO: 446 - protein, 70 aa, Synthetic construct
WLHQSPVPKLLFWGTPGVLIPPAEAARLAKSLPNCKAVDIGPGLNLLQEDNPDLIGSEIARWLSTLEISG

SEQ ID NO: 447 - protein, 227 aa, Synthetic construct
MAEIGTGFPFDPHYVEVLGERMHYVDVGPRDGTPVLFLHGNPTSSYVWRNIIPHVAPTHRCIAPDLIGMGKSDKPDLGYFFDDHVRFMDAFIEALGLEEVVLVIHDWGSALGFHWAKRNPERVKGIAFMEFIRPIPTWDEWPEFARETFQAFRTTDVGRKLIIDQNVFIEGTLPMGVVRPLTEVEMDHYREPFLNPVDREPLWRFPNELPIAGEPANIVALVEEYMD

SEQ ID NO: 448 - protein, 69 aa, Synthetic construct
LHQSPVPKLLFWGTPGVLIPPAEAARLAKSLPNCKAVDIGPGLNLLQEDNPDLIGSEIARWLSTLEISG

SEQ ID NO: 449 - protein, 228 aa, Synthetic construct
MAEIGTGFPFDPHYVEVLGERMHYVDVGPRDGTPVLFLHGNPTSSYVWRNIIPHVAPTHRCIAPDLIGMGKSDKPDLGYFFDDHVRFMDAFIEALGLEEVVLVIHDWGSALGFHWAKRNPERVKGIAFMEFIRPIPTWDEWPEFARETFQAFRTTDVGRKLIIDQNVFIEGTLPMGVVRPLTEVEMDHYREPFLNPVDREPLWRFPNELPIAGEPANIVALVEEYMDW

SEQ ID NO: 450 - protein, 68 aa, Synthetic construct
HQSPVPKLLFWGTPGVLIPPAEAARLAKSLPNCKAVDIGPGLNLLQEDNPDLIGSEIARWLSTLEISG

SEQ ID NO: 451 - protein, 229 aa, Synthetic construct
MAEIGTGFPFDPHYVEVLGERMHYVDVGPRDGTPVLFLHGNPTSSYVWRNIIPHVAPTHRCIAPDLIGMGKSDKPDLGYFFDDHVRFMDAFIEALGLEEVVLVIHDWGSALGFHWAKRNPERVKGIAFMEFIRPIPTWDEWPEFARETFQAFRTTDVGRKLIIDQNVFIEGTLPMGVVRPLTEVEMDHYREPFLNPVDREPLWRFPNELPIAGEPANIVALVEEYMDWL

SEQ ID NO: 452 - protein, 67 aa, Synthetic construct
QSPVPKLLFWGTPGVLIPPAEAARLAKSLPNCKAVDIGPGLNLLQEDNPDLIGSEIARWLSTLEISG

SEQ ID NO: 453 - protein, 230 aa, Synthetic construct
MAEIGTGFPFDPHYVEVLGERMHYVDVGPRDGTPVLFLHGNPTSSYVWRNIIPHVAPTHRCIAPDLIGMGKSDKPDLGYFFDDHVRFMDAFIEALGLEEVVLVIHDWGSALGFHWAKRNPERVKGIAFMEFIRPIPTWDEWPEFARETFQAFRTTDVGRKLIIDQNVFIEGTLPMGVVRPLTEVEMDHYREPFLNPVDREPLWRFPNELPIAGEPANIVALVEEYMDWLH

SEQ ID NO: 454 - protein, 66 aa, Synthetic construct
SPVPKLLFWGTPGVLIPPAEAARLAKSLPNCKAVDIGPGLNLLQEDNPDLIGSEIARWLSTLEISG

SEQ ID NO: 455 - protein, 231 aa, Synthetic construct
MAEIGTGFPFDPHYVEVLGERMHYVDVGPRDGTPVLFLHGNPTSSYVWRNIIPHVAPTHRCIAPDLIGMGKSDKPDLGYFFDDHVRFMDAFIEALGLEEVVLVIHDWGSALGFHWAKRNPERVKGIAFMEFIRPIPTWDEWPEFARETFQAFRTTDVGRKLIIDQNVFIEGTLPMGVVRPLTEVEMDHYREPFLNPVDREPLWRFPNELPIAGEPANIVALVEEYMDWLHQ

SEQ ID NO: 456 - protein, 65 aa, Synthetic construct
PVPKLLFWGTPGVLIPPAEAARLAKSLPNCKAVDIGPGLNLLQEDNPDLIGSEIARWLSTLEISG

SEQ ID NO: 457 - protein, 232 aa, Synthetic construct
MAEIGTGFPFDPHYVEVLGERMHYVDVGPRDGTPVLFLHGNPTSSYVWRNIIPHVAPTHRCIAPDLIGMGKSDKPDLGYFFDDHVRFMDAFIEALGLEEVVLVIHDWGSALGFHWAKRNPERVKGIAFMEFIRPIPTWDEWPEFARETFQAFRTTDVGRKLIIDQNVFIEGTLPMGVVRPLTEVEMDHYREPFLNPVDREPLWRFPNELPIAGEPANIVALVEEYMDWLHQS

SEQ ID NO: 458 - protein, 64 aa, Synthetic construct
VPKLLFWGTPGVLIPPAEAARLAKSLPNCKAVDIGPGLNLLQEDNPDLIGSEIARWLSTLEISG

SEQ ID NO: 459 - protein, 233 aa, Synthetic construct
MAEIGTGFPFDPHYVEVLGERMHYVDVGPRDGTPVLFLHGNPTSSYVWRNIIPHVAPTHRCIAPDLIGMGKSDKPDLGYFFDDHVRFMDAFIEALGLEEVVLVIHDWGSALGFHWAKRNPERVKGIAFMEFIRPIPTWDEWPEFARETFQAFRTTDVGRKLIIDQNVFIEGTLPMGVVRPLTEVEMDHYREPFLNPVDREPLWRFPNELPIAGEPANIVALVEEYMDWLHQSP

SEQ ID NO: 460 - protein, 63 aa, Synthetic construct
PKLLFWGTPGVLIPPAEAARLAKSLPNCKAVDIGPGLNLLQEDNPDLIGSEIARWLSTLEISG

SEQ ID NO: 461 - protein, 234 aa, Synthetic construct
MAEIGTGFPFDPHYVEVLGERMHYVDVGPRDGTPVLFLHGNPTSSYVWRNIIPHVAPTHRCIAPDLIGMGKSDKPDLGYFFDDHVRFMDAFIEALGLEEVVLVIHDWGSALGFHWAKRNPERVKGIAFMEFIRPIPTWDEWPEFARETFQAFRTTDVGRKLIIDQNVFIEGTLPMGVVRPLTEVEMDHYREPFLNPVDREPLWRFPNELPIAGEPANIVALVEEYMDWLHQSPV

SEQ ID NO: 462 - protein, 62 aa, Synthetic construct
KLLFWGTPGVLIPPAEAARLAKSLPNCKAVDIGPGLNLLQEDNPDLIGSEIARWLSTLEISG

SEQ ID NO: 463 - protein, 235 aa, Synthetic construct
MAEIGTGFPFDPHYVEVLGERMHYVDVGPRDGTPVLFLHGNPTSSYVWRNIIPHVAPTHRCIAPDLIGMGKSDKPDLGYFFDDHVRFMDAFIEALGLEEVVLVIHDWGSALGFHWAKRNPERVKGIAFMEFIRPIPTWDEWPEFARETFQAFRTTDVGRKLIIDQNVFIEGTLPMGVVRPLTEVEMDHYREPFLNPVDREPLWRFPNELPIAGEPANIVALVEEYMDWLHQSPVP

SEQ ID NO: 464 - protein, 61 aa, Synthetic construct
LLFWGTPGVLIPPAEAARLAKSLPNCKAVDIGPGLNLLQEDNPDLIGSEIARWLSTLEISG

SEQ ID NO: 465 - protein, 236 aa, Synthetic construct
MAEIGTGFPFDPHYVEVLGERMHYVDVGPRDGTPVLFLHGNPTSSYVWRNIIPHVAPTHRCIAPDLIGMGKSDKPDLGYFFDDHVRFMDAFIEALGLEEVVLVIHDWGSALGFHWAKRNPERVKGIAFMEFIRPIPTWDEWPEFARETFQAFRTTDVGRKLIIDQNVFIEGTLPMGVVRPLTEVEMDHYREPFLNPVDREPLWRFPNELPIAGEPANIVALVEEYMDWLHQSPVPK

SEQ ID NO: 466 - protein, 60 aa, Synthetic construct
LFWGTPGVLIPPAEAARLAKSLPNCKAVDIGPGLNLLQEDNPDLIGSEIARWLSTLEISG

SEQ ID NO: 467 - protein, 237 aa, Synthetic construct
MAEIGTGFPFDPHYVEVLGERMHYVDVGPRDGTPVLFLHGNPTSSYVWRNIIPHVAPTHRCIAPDLIGMGKSDKPDLGYFFDDHVRFMDAFIEALGLEEVVLVIHDWGSALGFHWAKRNPERVKGIAFMEFIRPIPTWDEWPEFARETFQAFRTTDVGRKLIIDQNVFIEGTLPMGVVRPLTEVEMDHYREPFLNPVDREPLWRFPNELPIAGEPANIVALVEEYMDWLHQSPVPKL

SEQ ID NO: 468 - protein, 59 aa, Synthetic construct
FWGTPGVLIPPAEAARLAKSLPNCKAVDIGPGLNLLQEDNPDLIGSEIARWLSTLEISG

SEQ ID NO: 469 - protein, 238 aa, Synthetic construct
MAEIGTGFPFDPHYVEVLGERMHYVDVGPRDGTPVLFLHGNPTSSYVWRNIIPHVAPTHRCIAPDLIGMGKSDKPDLGYFFDDHVRFMDAFIEALGLEEVVLVIHDWGSALGFHWAKRNPERVKGIAFMEFIRPIPTWDEWPEFARETFQAFRTTDVGRKLIIDQNVFIEGTLPMGVVRPLTEVEMDHYREPFLNPVDREPLWRFPNELPIAGEPANIVALVEEYMDWLHQSPVPKLL

SEQ ID NO: 470 - protein, 58 aa, Synthetic construct
WGTPGVLIPPAEAARLAKSLPNCKAVDIGPGLNLLQEDNPDLIGSEIARWLSTLEISG

SEQ ID NO: 471 - protein, 239 aa, Synthetic construct
MAEIGTGFPFDPHYVEVLGERMHYVDVGPRDGTPVLFLHGNPTSSYVWRNIIPHVAPTHRCIAPDLIGMGKSDKPDLGYFFDDHVRFMDAFIEALGLEEVVLVIHDWGSALGFHWAKRNPERVKGIAFMEFIRPIPTWDEWPEFARETFQAFRTTDVGRKLIIDQNVFIEGTLPMGVVRPLTEVEMDHYREPFLNPVDREPLWRFPNELPIAGEPANIVALVEEYMDWLHQSPVPKLLF

SEQ ID NO: 472 - protein, 57 aa, Synthetic construct
GTPGVLIPPAEAARLAKSLPNCKAVDIGPGLNLLQEDNPDLIGSEIARWLSTLEISG

SEQ ID NO: 473 - protein, 240 aa, Synthetic construct
MAEIGTGFPFDPHYVEVLGERMHYVDVGPRDGTPVLFLHGNPTSSYVWRNIIPHVAPTHRCIAPDLIGMGKSDKPDLGYFFDDHVRFMDAFIEALGLEEVVLVIHDWGSALGFHWAKRNPERVKGIAFMEFIRPIPTWDEWPEFARETFQAFRTTDVGRKLIIDQNVFIEGTLPMGVVRPLTEVEMDHYREPFLNPVDREPLWRFPNELPIAGEPANIVALVEEYMDWLHQSPVPKLLFW

SEQ ID NO: 474 - protein, 56 aa, Synthetic construct
TPGVLIPPAEAARLAKSLPNCKAVDIGPGLNLLQEDNPDLIGSEIARWLSTLEISG

SEQ ID NO: 475 - protein, 241 aa, Synthetic construct
MAEIGTGFPFDPHYVEVLGERMHYVDVGPRDGTPVLFLHGNPTSSYVWRNIIPHVAPTHRCIAPDLIGMGKSDKPDLGYFFDDHVRFMDAFIEALGLEEVVLVIHDWGSALGFHWAKRNPERVKGIAFMEFIRPIPTWDEWPEFARETFQAFRTTDVGRKLIIDQNVFIEGTLPMGVVRPLTEVEMDHYREPFLNPVDREPLWRFPNELPIAGEPANIVALVEEYMDWLHQSPVPKLLFWG

SEQ ID NO: 476 - protein, 55 aa, Synthetic construct
PGVLIPPAEAARLAKSLPNCKAVDIGPGLNLLQEDNPDLIGSEIARWLSTLEISG

SEQ ID NO: 477 - protein, 242 aa, Synthetic construct
MAEIGTGFPFDPHYVEVLGERMHYVDVGPRDGTPVLFLHGNPTSSYVWRNIIPHVAPTHRCIAPDLIGMGKSDKPDLGYFFDDHVRFMDAFIEALGLEEVVLVIHDWGSALGFHWAKRNPERVKGIAFMEFIRPIPTWDEWPEFARETFQAFRTTDVGRKLIIDQNVFIEGTLPMGVVRPLTEVEMDHYREPFLNPVDREPLWRFPNELPIAGEPANIVALVEEYMDWLHQSPVPKLLFWGT

SEQ ID NO: 478 - protein, 54 aa, Synthetic construct
GVLIPPAEAARLAKSLPNCKAVDIGPGLNLLQEDNPDLIGSEIARWLSTLEISG

SEQ ID NO: 479 - protein, 243 aa, Synthetic construct
MAEIGTGFPFDPHYVEVLGERMHYVDVGPRDGTPVLFLHGNPTSSYVWRNIIPHVAPTHRCIAPDLIGMGKSDKPDLGYFFDDHVRFMDAFIEALGLEEVVLVIHDWGSALGFHWAKRNPERVKGIAFMEFIRPIPTWDEWPEFARETFQAFRTTDVGRKLIIDQNVFIEGTLPMGVVRPLTEVEMDHYREPFLNPVDREPLWRFPNELPIAGEPANIVALVEEYMDWLHQSPVPKLLFWGTP

SEQ ID NO: 480 - protein, 53 aa, Synthetic construct
VLIPPAEAARLAKSLPNCKAVDIGPGLNLLQEDNPDLIGSEIARWLSTLEISG

SEQ ID NO: 481 - protein, 244 aa, Synthetic construct
MAEIGTGFPFDPHYVEVLGERMHYVDVGPRDGTPVLFLHGNPTSSYVWRNIIPHVAPTHRCIAPDLIGMGKSDKPDLGYFFDDHVRFMDAFIEALGLEEVVLVIHDWGSALGFHWAKRNPERVKGIAFMEFIRPIPTWDEWPEFARETFQAFRTTDVGRKLIIDQNVFIEGTLPMGVVRPLTEVEMDHYREPFLNPVDREPLWRFPNELPIAGEPANIVALVEEYMDWLHQSPVPKLLFWGTPG

SEQ ID NO: 482 - protein, 52 aa, Synthetic construct
LIPPAEAARLAKSLPNCKAVDIGPGLNLLQEDNPDLIGSEIARWLSTLEISG

SEQ ID NO: 483 - protein, 245 aa, Synthetic construct
MAEIGTGFPFDPHYVEVLGERMHYVDVGPRDGTPVLFLHGNPTSSYVWRNIIPHVAPTHRCIAPDLIGMGKSDKPDLGYFFDDHVRFMDAFIEALGLEEVVLVIHDWGSALGFHWAKRNPERVKGIAFMEFIRPIPTWDEWPEFARETFQAFRTTDVGRKLIIDQNVFIEGTLPMGVVRPLTEVEMDHYREPFLNPVDREPLWRFPNELPIAGEPANIVALVEEYMDWLHQSPVPKLLFWGTPGV

SEQ ID NO: 484 - protein, 51 aa, Synthetic construct
IPPAEAARLAKSLPNCKAVDIGPGLNLLQEDNPDLIGSEIARWLSTLEISG

SEQ ID NO: 485 - protein, 246 aa, Synthetic construct
MAEIGTGFPFDPHYVEVLGERMHYVDVGPRDGTPVLFLHGNPTSSYVWRNIIPHVAPTHRCIAPDLIGMGKSDKPDLGYFFDDHVRFMDAFIEALGLEEVVLVIHDWGSALGFHWAKRNPERVKGIAFMEFIRPIPTWDEWPEFARETFQAFRTTDVGRKLIIDQNVFIEGTLPMGVVRPLTEVEMDHYREPFLNPVDREPLWRFPNELPIAGEPANIVALVEEYMDWLHQSPVPKLLFWGTPGVL

SEQ ID NO: 486 - protein, 50 aa, Synthetic construct
PPAEAARLAKSLPNCKAVDIGPGLNLLQEDNPDLIGSEIARWLSTLEISG

SEQ ID NO: 487 - protein, 247 aa, Synthetic construct
MAEIGTGFPFDPHYVEVLGERMHYVDVGPRDGTPVLFLHGNPTSSYVWRNIIPHVAPTHRCIAPDLIGMGKSDKPDLGYFFDDHVRFMDAFIEALGLEEVVLVIHDWGSALGFHWAKRNPERVKGIAFMEFIRPIPTWDEWPEFARETFQAFRTTDVGRKLIIDQNVFIEGTLPMGVVRPLTEVEMDHYREPFLNPVDREPLWRFPNELPIAGEPANIVALVEEYMDWLHQSPVPKLLFWGTPGVLI

SEQ ID NO: 488 - protein, 49 aa, Synthetic construct
PAEAARLAKSLPNCKAVDIGPGLNLLQEDNPDLIGSEIARWLSTLEISG

SEQ ID NO: 489 - protein, 248 aa, Synthetic construct
MAEIGTGFPFDPHYVEVLGERMHYVDVGPRDGTPVLFLHGNPTSSYVWRNIIPHVAPTHRCIAPDLIGMGKSDKPDLGYFFDDHVRFMDAFIEALGLEEVVLVIHDWGSALGFHWAKRNPERVKGIAFMEFIRPIPTWDEWPEFARETFQAFRTTDVGRKLIIDQNVFIEGTLPMGVVRPLTEVEMDHYREPFLNPVDREPLWRFPNELPIAGEPANIVALVEEYMDWLHQSPVPKLLFWGTPGVLIP

SEQ ID NO: 490 - protein, 48 aa, Synthetic construct
AEAARLAKSLPNCKAVDIGPGLNLLQEDNPDLIGSEIARWLSTLEISG

SEQ ID NO: 491 - protein, 249 aa, Synthetic construct
MAEIGTGFPFDPHYVEVLGERMHYVDVGPRDGTPVLFLHGNPTSSYVWRNIIPHVAPTHRCIAPDLIGMGKSDKPDLGYFFDDHVRFMDAFIEALGLEEVVLVIHDWGSALGFHWAKRNPERVKGIAFMEFIRPIPTWDEWPEFARETFQAFRTTDVGRKLIIDQNVFIEGTLPMGVVRPLTEVEMDHYREPFLNPVDREPLWRFPNELPIAGEPANIVALVEEYMDWLHQSPVPKLLFWGTPGVLIPP

SEQ ID NO: 492 - protein, 47 aa, Synthetic construct
EAARLAKSLPNCKAVDIGPGLNLLQEDNPDLIGSEIARWLSTLEISG

SEQ ID NO: 493 - protein, 250 aa, Synthetic construct
MAEIGTGFPFDPHYVEVLGERMHYVDVGPRDGTPVLFLHGNPTSSYVWRNIIPHVAPTHRCIAPDLIGMGKSDKPDLGYFFDDHVRFMDAFIEALGLEEVVLVIHDWGSALGFHWAKRNPERVKGIAFMEFIRPIPTWDEWPEFARETFQAFRTTDVGRKLIIDQNVFIEGTLPMGVVRPLTEVEMDHYREPFLNPVDREPLWRFPNELPIAGEPANIVALVEEYMDWLHQSPVPKLLFWGTPGVLIPPA

SEQ ID NO: 494 - protein, 46 aa, Synthetic construct
AARLAKSLPNCKAVDIGPGLNLLQEDNPDLIGSEIARWLSTLEISG

SEQ ID NO: 495 - protein, 251 aa, Synthetic construct
MAEIGTGFPFDPHYVEVLGERMHYVDVGPRDGTPVLFLHGNPTSSYVWRNIIPHVAPTHRCIAPDLIGMGKSDKPDLGYFFDDHVRFMDAFIEALGLEEVVLVIHDWGSALGFHWAKRNPERVKGIAFMEFIRPIPTWDEWPEFARETFQAFRTTDVGRKLIIDQNVFIEGTLPMGVVRPLTEVEMDHYREPFLNPVDREPLWRFPNELPIAGEPANIVALVEEYMDWLHQSPVPKLLFWGTPGVLIPPAE

SEQ ID NO: 496 - protein, 45 aa, Synthetic construct
ARLAKSLPNCKAVDIGPGLNLLQEDNPDLIGSEIARWLSTLEISG

SEQ ID NO: 497 - protein, 252 aa, Synthetic construct
MAEIGTGFPFDPHYVEVLGERMHYVDVGPRDGTPVLFLHGNPTSSYVWRNIIPHVAPTHRCIAPDLIGMGKSDKPDLGYFFDDHVRFMDAFIEALGLEEVVLVIHDWGSALGFHWAKRNPERVKGIAFMEFIRPIPTWDEWPEFARETFQAFRTTDVGRKLIIDQNVFIEGTLPMGVVRPLTEVEMDHYREPFLNPVDREPLWRFPNELPIAGEPANIVALVEEYMDWLHQSPVPKLLFWGTPGVLIPPAEA

SEQ ID NO: 498 - protein, 44 aa, Synthetic construct
RLAKSLPNCKAVDIGPGLNLLQEDNPDLIGSEIARWLSTLEISG

SEQ ID NO: 499 - protein, 253 aa, Synthetic construct
MAEIGTGFPFDPHYVEVLGERMHYVDVGPRDGTPVLFLHGNPTSSYVWRNIIPHVAPTHRCIAPDLIGMGKSDKPDLGYFFDDHVRFMDAFIEALGLEEVVLVIHDWGSALGFHWAKRNPERVKGIAFMEFIRPIPTWDEWPEFARETFQAFRTTDVGRKLIIDQNVFIEGTLPMGVVRPLTEVEMDHYREPFLNPVDREPLWRFPNELPIAGEPANIVALVEEYMDWLHQSPVPKLLFWGTPGVLIPPAEAA

SEQ ID NO: 500 - protein, 43 aa, Synthetic construct
LAKSLPNCKAVDIGPGLNLLQEDNPDLIGSEIARWLSTLEISG

SEQ ID NO: 501 - protein, 254 aa, Synthetic construct
MAEIGTGFPFDPHYVEVLGERMHYVDVGPRDGTPVLFLHGNPTSSYVWRNIIPHVAPTHRCIAPDLIGMGKSDKPDLGYFFDDHVRFMDAFIEALGLEEVVLVIHDWGSALGFHWAKRNPERVKGIAFMEFIRPIPTWDEWPEFARETFQAFRTTDVGRKLIIDQNVFIEGTLPMGVVRPLTEVEMDHYREPFLNPVDREPLWRFPNELPIAGEPANIVALVEEYMDWLHQSPVPKLLFWGTPGVLIPPAEAAR

SEQ ID NO: 502 - protein, 42 aa, Synthetic construct
AKSLPNCKAVDIGPGLNLLQEDNPDLIGSEIARWLSTLEISG

SEQ ID NO: 503 - protein, 255 aa, Synthetic construct
MAEIGTGFPFDPHYVEVLGERMHYVDVGPRDGTPVLFLHGNPTSSYVWRNIIPHVAPTHRCIAPDLIGMGKSDKPDLGYFFDDHVRFMDAFIEALGLEEVVLVIHDWGSALGFHWAKRNPERVKGIAFMEFIRPIPTWDEWPEFARETFQAFRTTDVGRKLIIDQNVFIEGTLPMGVVRPLTEVEMDHYREPFLNPVDREPLWRFPNELPIAGEPANIVALVEEYMDWLHQSPVPKLLFWGTPGVLIPPAEAARL

SEQ ID NO: 504 - protein, 41 aa, Synthetic construct
KSLPNCKAVDIGPGLNLLQEDNPDLIGSEIARWLSTLEISG

SEQ ID NO: 505 - protein, 256 aa, Synthetic construct
MAEIGTGFPFDPHYVEVLGERMHYVDVGPRDGTPVLFLHGNPTSSYVWRNIIPHVAPTHRCIAPDLIGMGKSDKPDLGYFFDDHVRFMDAFIEALGLEEVVLVIHDWGSALGFHWAKRNPERVKGIAFMEFIRPIPTWDEWPEFARETFQAFRTTDVGRKLIIDQNVFIEGTLPMGVVRPLTEVEMDHYREPFLNPVDREPLWRFPNELPIAGEPANIVALVEEYMDWLHQSPVPKLLFWGTPGVLIPPAEAARLA

SEQ ID NO: 506 - protein, 40 aa, Synthetic construct
SLPNCKAVDIGPGLNLLQEDNPDLIGSEIARWLSTLEISG

SEQ ID NO: 507 - protein, 257 aa, Synthetic construct
MAEIGTGFPFDPHYVEVLGERMHYVDVGPRDGTPVLFLHGNPTSSYVWRNIIPHVAPTHRCIAPDLIGMGKSDKPDLGYFFDDHVRFMDAFIEALGLEEVVLVIHDWGSALGFHWAKRNPERVKGIAFMEFIRPIPTWDEWPEFARETFQAFRTTDVGRKLIIDQNVFIEGTLPMGVVRPLTEVEMDHYREPFLNPVDREPLWRFPNELPIAGEPANIVALVEEYMDWLHQSPVPKLLFWGTPGVLIPPAEAARLAK

SEQ ID NO: 508 - protein, 39 aa, Synthetic construct
LPNCKAVDIGPGLNLLQEDNPDLIGSEIARWLSTLEISG

SEQ ID NO: 509 - protein, 258 aa, Synthetic construct
MAEIGTGFPFDPHYVEVLGERMHYVDVGPRDGTPVLFLHGNPTSSYVWRNIIPHVAPTHRCIAPDLIGMGKSDKPDLGYFFDDHVRFMDAFIEALGLEEVVLVIHDWGSALGFHWAKRNPERVKGIAFMEFIRPIPTWDEWPEFARETFQAFRTTDVGRKLIIDQNVFIEGTLPMGVVRPLTEVEMDHYREPFLNPVDREPLWRFPNELPIAGEPANIVALVEEYMDWLHQSPVPKLLFWGTPGVLIPPAEAARLAKS

SEQ ID NO: 510 - protein, 38 aa, Synthetic construct
PNCKAVDIGPGLNLLQEDNPDLIGSEIARWLSTLEISG

SEQ ID NO: 511 - protein, 259 aa, Synthetic construct
MAEIGTGFPFDPHYVEVLGERMHYVDVGPRDGTPVLFLHGNPTSSYVWRNIIPHVAPTHRCIAPDLIGMGKSDKPDLGYFFDDHVRFMDAFIEALGLEEVVLVIHDWGSALGFHWAKRNPERVKGIAFMEFIRPIPTWDEWPEFARETFQAFRTTDVGRKLIIDQNVFIEGTLPMGVVRPLTEVEMDHYREPFLNPVDREPLWRFPNELPIAGEPANIVALVEEYMDWLHQSPVPKLLFWGTPGVLIPPAEAARLAKSL

SEQ ID NO: 512 - protein, 37 aa, Synthetic construct
NCKAVDIGPGLNLLQEDNPDLIGSEIARWLSTLEISG

SEQ ID NO: 513 - protein, 260 aa, Synthetic construct
MAEIGTGFPFDPHYVEVLGERMHYVDVGPRDGTPVLFLHGNPTSSYVWRNIIPHVAPTHRCIAPDLIGMGKSDKPDLGYFFDDHVRFMDAFIEALGLEEVVLVIHDWGSALGFHWAKRNPERVKGIAFMEFIRPIPTWDEWPEFARETFQAFRTTDVGRKLIIDQNVFIEGTLPMGVVRPLTEVEMDHYREPFLNPVDREPLWRFPNELPIAGEPANIVALVEEYMDWLHQSPVPKLLFWGTPGVLIPPAEAARLAKSLP

SEQ ID NO: 514 - protein, 36 aa, Synthetic construct
CKAVDIGPGLNLLQEDNPDLIGSEIARWLSTLEISG

SEQ ID NO: 515 - protein, 261 aa, Synthetic construct
MAEIGTGFPFDPHYVEVLGERMHYVDVGPRDGTPVLFLHGNPTSSYVWRNIIPHVAPTHRCIAPDLIGMGKSDKPDLGYFFDDHVRFMDAFIEALGLEEVVLVIHDWGSALGFHWAKRNPERVKGIAFMEFIRPIPTWDEWPEFARETFQAFRTTDVGRKLIIDQNVFIEGTLPMGVVRPLTEVEMDHYREPFLNPVDREPLWRFPNELPIAGEPANIVALVEEYMDWLHQSPVPKLLFWGTPGVLIPPAEAARLAKSLPN

SEQ ID NO: 516 - protein, 35 aa, Synthetic construct
KAVDIGPGLNLLQEDNPDLIGSEIARWLSTLEISG

SEQ ID NO: 517 - protein, 262 aa, Synthetic construct
MAEIGTGFPFDPHYVEVLGERMHYVDVGPRDGTPVLFLHGNPTSSYVWRNIIPHVAPTHRCIAPDLIGMGKSDKPDLGYFFDDHVRFMDAFIEALGLEEVVLVIHDWGSALGFHWAKRNPERVKGIAFMEFIRPIPTWDEWPEFARETFQAFRTTDVGRKLIIDQNVFIEGTLPMGVVRPLTEVEMDHYREPFLNPVDREPLWRFPNELPIAGEPANIVALVEEYMDWLHQSPVPKLLFWGTPGVLIPPAEAARLAKSLPNC

SEQ ID NO: 518 - protein, 34 aa, Synthetic construct
AVDIGPGLNLLQEDNPDLIGSEIARWLSTLEISG

SEQ ID NO: 519 - protein, 263 aa, Synthetic construct
MAEIGTGFPFDPHYVEVLGERMHYVDVGPRDGTPVLFLHGNPTSSYVWRNIIPHVAPTHRCIAPDLIGMGKSDKPDLGYFFDDHVRFMDAFIEALGLEEVVLVIHDWGSALGFHWAKRNPERVKGIAFMEFIRPIPTWDEWPEFARETFQAFRTTDVGRKLIIDQNVFIEGTLPMGVVRPLTEVEMDHYREPFLNPVDREPLWRFPNELPIAGEPANIVALVEEYMDWLHQSPVPKLLFWGTPGVLIPPAEAARLAKSLPNCK

SEQ ID NO: 520 - protein, 33 aa, Synthetic construct
VDIGPGLNLLQEDNPDLIGSEIARWLSTLEISG

SEQ ID NO: 521 - protein, 264 aa, Synthetic construct
MAEIGTGFPFDPHYVEVLGERMHYVDVGPRDGTPVLFLHGNPTSSYVWRNIIPHVAPTHRCIAPDLIGMGKSDKPDLGYFFDDHVRFMDAFIEALGLEEVVLVIHDWGSALGFHWAKRNPERVKGIAFMEFIRPIPTWDEWPEFARETFQAFRTTDVGRKLIIDQNVFIEGTLPMGVVRPLTEVEMDHYREPFLNPVDREPLWRFPNELPIAGEPANIVALVEEYMDWLHQSPVPKLLFWGTPGVLIPPAEAARLAKSLPNCKA

SEQ ID NO: 522 - protein, 32 aa, Synthetic construct
DIGPGLNLLQEDNPDLIGSEIARWLSTLEISG

SEQ ID NO: 523 - protein, 265 aa, Synthetic construct
MAEIGTGFPFDPHYVEVLGERMHYVDVGPRDGTPVLFLHGNPTSSYVWRNIIPHVAPTHRCIAPDLIGMGKSDKPDLGYFFDDHVRFMDAFIEALGLEEVVLVIHDWGSALGFHWAKRNPERVKGIAFMEFIRPIPTWDEWPEFARETFQAFRTTDVGRKLIIDQNVFIEGTLPMGVVRPLTEVEMDHYREPFLNPVDREPLWRFPNELPIAGEPANIVALVEEYMDWLHQSPVPKLLFWGTPGVLIPPAEAARLAKSLPNCKAV

SEQ ID NO: 524 - protein, 31 aa, Synthetic construct
IGPGLNLLQEDNPDLIGSEIARWLSTLEISG

SEQ ID NO: 525 - protein, 266 aa, Synthetic construct
MAEIGTGFPFDPHYVEVLGERMHYVDVGPRDGTPVLFLHGNPTSSYVWRNIIPHVAPTHRCIAPDLIGMGKSDKPDLGYFFDDHVRFMDAFIEALGLEEVVLVIHDWGSALGFHWAKRNPERVKGIAFMEFIRPIPTWDEWPEFARETFQAFRTTDVGRKLIIDQNVFIEGTLPMGVVRPLTEVEMDHYREPFLNPVDREPLWRFPNELPIAGEPANIVALVEEYMDWLHQSPVPKLLFWGTPGVLIPPAEAARLAKSLPNCKAVD

SEQ ID NO: 526 - protein, 30 aa, Synthetic construct
GPGLNLLQEDNPDLIGSEIARWLSTLEISG

SEQ ID NO: 527 - protein, 267 aa, Synthetic construct
MAEIGTGFPFDPHYVEVLGERMHYVDVGPRDGTPVLFLHGNPTSSYVWRNIIPHVAPTHRCIAPDLIGMGKSDKPDLGYFFDDHVRFMDAFIEALGLEEVVLVIHDWGSALGFHWAKRNPERVKGIAFMEFIRPIPTWDEWPEFARETFQAFRTTDVGRKLIIDQNVFIEGTLPMGVVRPLTEVEMDHYREPFLNPVDREPLWRFPNELPIAGEPANIVALVEEYMDWLHQSPVPKLLFWGTPGVLIPPAEAARLAKSLPNCKAVDI

SEQ ID NO: 528 - protein, 29 aa, Synthetic construct
PGLNLLQEDNPDLIGSEIARWLSTLEISG

SEQ ID NO: 529 - protein, 268 aa, Synthetic construct
MAEIGTGFPFDPHYVEVLGERMHYVDVGPRDGTPVLFLHGNPTSSYVWRNIIPHVAPTHRCIAPDLIGMGKSDKPDLGYFFDDHVRFMDAFIEALGLEEVVLVIHDWGSALGFHWAKRNPERVKGIAFMEFIRPIPTWDEWPEFARETFQAFRTTDVGRKLIIDQNVFIEGTLPMGVVRPLTEVEMDHYREPFLNPVDREPLWRFPNELPIAGEPANIVALVEEYMDWLHQSPVPKLLFWGTPGVLIPPAEAARLAKSLPNCKAVDIG

SEQ ID NO: 530 - protein, 28 aa, Synthetic construct
GLNLLQEDNPDLIGSEIARWLSTLEISG

SEQ ID NO: 531 - protein, 269 aa, Synthetic construct
MAEIGTGFPFDPHYVEVLGERMHYVDVGPRDGTPVLFLHGNPTSSYVWRNIIPHVAPTHRCIAPDLIGMGKSDKPDLGYFFDDHVRFMDAFIEALGLEEVVLVIHDWGSALGFHWAKRNPERVKGIAFMEFIRPIPTWDEWPEFARETFQAFRTTDVGRKLIIDQNVFIEGTLPMGVVRPLTEVEMDHYREPFLNPVDREPLWRFPNELPIAGEPANIVALVEEYMDWLHQSPVPKLLFWGTPGVLIPPAEAARLAKSLPNCKAVDIGP

SEQ ID NO: 532 - protein, 27 aa, Synthetic construct
LNLLQEDNPDLIGSEIARWLSTLEISG

SEQ ID NO: 533 - protein, 270 aa, Synthetic construct
MAEIGTGFPFDPHYVEVLGERMHYVDVGPRDGTPVLFLHGNPTSSYVWRNIIPHVAPTHRCIAPDLIGMGKSDKPDLGYFFDDHVRFMDAFIEALGLEEVVLVIHDWGSALGFHWAKRNPERVKGIAFMEFIRPIPTWDEWPEFARETFQAFRTTDVGRKLIIDQNVFIEGTLPMGVVRPLTEVEMDHYREPFLNPVDREPLWRFPNELPIAGEPANIVALVEEYMDWLHQSPVPKLLFWGTPGVLIPPAEAARLAKSLPNCKAVDIGPG

SEQ ID NO: 534 - protein, 26 aa, Synthetic construct
NLLQEDNPDLIGSEIARWLSTLEISG

SEQ ID NO: 535 - protein, 271 aa, Synthetic construct
MAEIGTGFPFDPHYVEVLGERMHYVDVGPRDGTPVLFLHGNPTSSYVWRNIIPHVAPTHRCIAPDLIGMGKSDKPDLGYFFDDHVRFMDAFIEALGLEEVVLVIHDWGSALGFHWAKRNPERVKGIAFMEFIRPIPTWDEWPEFARETFQAFRTTDVGRKLIIDQNVFIEGTLPMGVVRPLTEVEMDHYREPFLNPVDREPLWRFPNELPIAGEPANIVALVEEYMDWLHQSPVPKLLFWGTPGVLIPPAEAARLAKSLPNCKAVDIGPGL

SEQ ID NO: 536 - protein, 25 aa, Synthetic construct
LLQEDNPDLIGSEIARWLSTLEISG

SEQ ID NO: 537 - protein, 272 aa, Synthetic construct
MAEIGTGFPFDPHYVEVLGERMHYVDVGPRDGTPVLFLHGNPTSSYVWRNIIPHVAPTHRCIAPDLIGMGKSDKPDLGYFFDDHVRFMDAFIEALGLEEVVLVIHDWGSALGFHWAKRNPERVKGIAFMEFIRPIPTWDEWPEFARETFQAFRTTDVGRKLIIDQNVFIEGTLPMGVVRPLTEVEMDHYREPFLNPVDREPLWRFPNELPIAGEPANIVALVEEYMDWLHQSPVPKLLFWGTPGVLIPPAEAARLAKSLPNCKAVDIGPGLN

SEQ ID NO: 538 - protein, 24 aa, Synthetic construct
LQEDNPDLIGSEIARWLSTLEISG

SEQ ID NO: 539 - protein, 273 aa, Synthetic construct
MAEIGTGFPFDPHYVEVLGERMHYVDVGPRDGTPVLFLHGNPTSSYVWRNIIPHVAPTHRCIAPDLIGMGKSDKPDLGYFFDDHVRFMDAFIEALGLEEVVLVIHDWGSALGFHWAKRNPERVKGIAFMEFIRPIPTWDEWPEFARETFQAFRTTDVGRKLIIDQNVFIEGTLPMGVVRPLTEVEMDHYREPFLNPVDREPLWRFPNELPIAGEPANIVALVEEYMDWLHQSPVPKLLFWGTPGVLIPPAEAARLAKSLPNCKAVDIGPGLNL

SEQ ID NO: 540 - protein, 23 aa, Synthetic construct
QEDNPDLIGSEIARWLSTLEISG

SEQ ID NO: 541 - protein, 274 aa, Synthetic construct
MAEIGTGFPFDPHYVEVLGERMHYVDVGPRDGTPVLFLHGNPTSSYVWRNIIPHVAPTHRCIAPDLIGMGKSDKPDLGYFFDDHVRFMDAFIEALGLEEVVLVIHDWGSALGFHWAKRNPERVKGIAFMEFIRPIPTWDEWPEFARETFQAFRTTDVGRKLIIDQNVFIEGTLPMGVVRPLTEVEMDHYREPFLNPVDREPLWRFPNELPIAGEPANIVALVEEYMDWLHQSPVPKLLFWGTPGVLIPPAEAARLAKSLPNCKAVDIGPGLNLL

SEQ ID NO: 542 - protein, 22 aa, Synthetic construct
EDNPDLIGSEIARWLSTLEISG

SEQ ID NO: 543 - protein, 275 aa, Synthetic construct
MAEIGTGFPFDPHYVEVLGERMHYVDVGPRDGTPVLFLHGNPTSSYVWRNIIPHVAPTHRCIAPDLIGMGKSDKPDLGYFFDDHVRFMDAFIEALGLEEVVLVIHDWGSALGFHWAKRNPERVKGIAFMEFIRPIPTWDEWPEFARETFQAFRTTDVGRKLIIDQNVFIEGTLPMGVVRPLTEVEMDHYREPFLNPVDREPLWRFPNELPIAGEPANIVALVEEYMDWLHQSPVPKLLFWGTPGVLIPPAEAARLAKSLPNCKAVDIGPGLNLLQ

SEQ ID NO: 544 - protein, 21 aa, Synthetic construct
DNPDLIGSEIARWLSTLEISG

SEQ ID NO: 545 - protein, 276 aa, Synthetic construct
MAEIGTGFPFDPHYVEVLGERMHYVDVGPRDGTPVLFLHGNPTSSYVWRNIIPHVAPTHRCIAPDLIGMGKSDKPDLGYFFDDHVRFMDAFIEALGLEEVVLVIHDWGSALGFHWAKRNPERVKGIAFMEFIRPIPTWDEWPEFARETFQAFRTTDVGRKLIIDQNVFIEGTLPMGVVRPLTEVEMDHYREPFLNPVDREPLWRFPNELPIAGEPANIVALVEEYMDWLHQSPVPKLLFWGTPGVLIPPAEAARLAKSLPNCKAVDIGPGLNLLQE

SEQ ID NO: 546 - protein, 20 aa, Synthetic construct
NPDLIGSEIARWLSTLEISG

SEQ ID NO: 547 - protein, 277 aa, Synthetic construct
MAEIGTGFPFDPHYVEVLGERMHYVDVGPRDGTPVLFLHGNPTSSYVWRNIIPHVAPTHRCIAPDLIGMGKSDKPDLGYFFDDHVRFMDAFIEALGLEEVVLVIHDWGSALGFHWAKRNPERVKGIAFMEFIRPIPTWDEWPEFARETFQAFRTTDVGRKLIIDQNVFIEGTLPMGVVRPLTEVEMDHYREPFLNPVDREPLWRFPNELPIAGEPANIVALVEEYMDWLHQSPVPKLLFWGTPGVLIPPAEAARLAKSLPNCKAVDIGPGLNLLQED

SEQ ID NO: 548 - protein, 19 aa, Synthetic construct
PDLIGSEIARWLSTLEISG

SEQ ID NO: 549 - protein, 278 aa, Synthetic construct
MAEIGTGFPFDPHYVEVLGERMHYVDVGPRDGTPVLFLHGNPTSSYVWRNIIPHVAPTHRCIAPDLIGMGKSDKPDLGYFFDDHVRFMDAFIEALGLEEVVLVIHDWGSALGFHWAKRNPERVKGIAFMEFIRPIPTWDEWPEFARETFQAFRTTDVGRKLIIDQNVFIEGTLPMGVVRPLTEVEMDHYREPFLNPVDREPLWRFPNELPIAGEPANIVALVEEYMDWLHQSPVPKLLFWGTPGVLIPPAEAARLAKSLPNCKAVDIGPGLNLLQEDN

SEQ ID NO: 550 - protein, 18 aa, Synthetic construct
DLIGSEIARWLSTLEISG

SEQ ID NO: 551 - protein, 279 aa, Synthetic construct
MAEIGTGFPFDPHYVEVLGERMHYVDVGPRDGTPVLFLHGNPTSSYVWRNIIPHVAPTHRCIAPDLIGMGKSDKPDLGYFFDDHVRFMDAFIEALGLEEVVLVIHDWGSALGFHWAKRNPERVKGIAFMEFIRPIPTWDEWPEFARETFQAFRTTDVGRKLIIDQNVFIEGTLPMGVVRPLTEVEMDHYREPFLNPVDREPLWRFPNELPIAGEPANIVALVEEYMDWLHQSPVPKLLFWGTPGVLIPPAEAARLAKSLPNCKAVDIGPGLNLLQEDNP

SEQ ID NO: 552 - protein, 17 aa, Synthetic construct
LIGSEIARWLSTLEISG

SEQ ID NO: 553 - protein, 280 aa, Synthetic construct
MAEIGTGFPFDPHYVEVLGERMHYVDVGPRDGTPVLFLHGNPTSSYVWRNIIPHVAPTHRCIAPDLIGMGKSDKPDLGYFFDDHVRFMDAFIEALGLEEVVLVIHDWGSALGFHWAKRNPERVKGIAFMEFIRPIPTWDEWPEFARETFQAFRTTDVGRKLIIDQNVFIEGTLPMGVVRPLTEVEMDHYREPFLNPVDREPLWRFPNELPIAGEPANIVALVEEYMDWLHQSPVPKLLFWGTPGVLIPPAEAARLAKSLPNCKAVDIGPGLNLLQEDNPD

SEQ ID NO: 554 - protein, 16 aa, Synthetic construct
IGSEIARWLSTLEISG

SEQ ID NO: 555 - protein, 281 aa, Synthetic construct
MAEIGTGFPFDPHYVEVLGERMHYVDVGPRDGTPVLFLHGNPTSSYVWRNIIPHVAPTHRCIAPDLIGMGKSDKPDLGYFFDDHVRFMDAFIEALGLEEVVLVIHDWGSALGFHWAKRNPERVKGIAFMEFIRPIPTWDEWPEFARETFQAFRTTDVGRKLIIDQNVFIEGTLPMGVVRPLTEVEMDHYREPFLNPVDREPLWRFPNELPIAGEPANIVALVEEYMDWLHQSPVPKLLFWGTPGVLIPPAEAARLAKSLPNCKAVDIGPGLNLLQEDNPDL

SEQ ID NO: 556 - protein, 15 aa, Synthetic construct
GSEIARWLSTLEISG

SEQ ID NO: 557 - protein, 282 aa, Synthetic construct
MAEIGTGFPFDPHYVEVLGERMHYVDVGPRDGTPVLFLHGNPTSSYVWRNIIPHVAPTHRCIAPDLIGMGKSDKPDLGYFFDDHVRFMDAFIEALGLEEVVLVIHDWGSALGFHWAKRNPERVKGIAFMEFIRPIPTWDEWPEFARETFQAFRTTDVGRKLIIDQNVFIEGTLPMGVVRPLTEVEMDHYREPFLNPVDREPLWRFPNELPIAGEPANIVALVEEYMDWLHQSPVPKLLFWGTPGVLIPPAEAARLAKSLPNCKAVDIGPGLNLLQEDNPDLI

SEQ ID NO: 558 - protein, 14 aa, Synthetic construct
SEIARWLSTLEISG

SEQ ID NO: 559 - protein, 283 aa, Synthetic construct
MAEIGTGFPFDPHYVEVLGERMHYVDVGPRDGTPVLFLHGNPTSSYVWRNIIPHVAPTHRCIAPDLIGMGKSDKPDLGYFFDDHVRFMDAFIEALGLEEVVLVIHDWGSALGFHWAKRNPERVKGIAFMEFIRPIPTWDEWPEFARETFQAFRTTDVGRKLIIDQNVFIEGTLPMGVVRPLTEVEMDHYREPFLNPVDREPLWRFPNELPIAGEPANIVALVEEYMDWLHQSPVPKLLFWGTPGVLIPPAEAARLAKSLPNCKAVDIGPGLNLLQEDNPDLIG

SEQ ID NO: 560 - protein, 13 aa, Synthetic construct
EIARWLSTLEISG

SEQ ID NO: 561 - protein, 284 aa, Synthetic construct
MAEIGTGFPFDPHYVEVLGERMHYVDVGPRDGTPVLFLHGNPTSSYVWRNIIPHVAPTHRCIAPDLIGMGKSDKPDLGYFFDDHVRFMDAFIEALGLEEVVLVIHDWGSALGFHWAKRNPERVKGIAFMEFIRPIPTWDEWPEFARETFQAFRTTDVGRKLIIDQNVFIEGTLPMGVVRPLTEVEMDHYREPFLNPVDREPLWRFPNELPIAGEPANIVALVEEYMDWLHQSPVPKLLFWGTPGVLIPPAEAARLAKSLPNCKAVDIGPGLNLLQEDNPDLIGS

SEQ ID NO: 562 - protein, 12 aa, Synthetic construct
IARWLSTLEISG

SEQ ID NO: 563 - protein, 285 aa, Synthetic construct
MAEIGTGFPFDPHYVEVLGERMHYVDVGPRDGTPVLFLHGNPTSSYVWRNIIPHVAPTHRCIAPDLIGMGKSDKPDLGYFFDDHVRFMDAFIEALGLEEVVLVIHDWGSALGFHWAKRNPERVKGIAFMEFIRPIPTWDEWPEFARETFQAFRTTDVGRKLIIDQNVFIEGTLPMGVVRPLTEVEMDHYREPFLNPVDREPLWRFPNELPIAGEPANIVALVEEYMDWLHQSPVPKLLFWGTPGVLIPPAEAARLAKSLPNCKAVDIGPGLNLLQEDNPDLIGSE

SEQ ID NO: 564 - protein, 11 aa, Synthetic construct
ARWLSTLEISG

SEQ ID NO: 565 - protein, 286 aa, Synthetic construct
MAEIGTGFPFDPHYVEVLGERMHYVDVGPRDGTPVLFLHGNPTSSYVWRNIIPHVAPTHRCIAPDLIGMGKSDKPDLGYFFDDHVRFMDAFIEALGLEEVVLVIHDWGSALGFHWAKRNPERVKGIAFMEFIRPIPTWDEWPEFARETFQAFRTTDVGRKLIIDQNVFIEGTLPMGVVRPLTEVEMDHYREPFLNPVDREPLWRFPNELPIAGEPANIVALVEEYMDWLHQSPVPKLLFWGTPGVLIPPAEAARLAKSLPNCKAVDIGPGLNLLQEDNPDLIGSEI

SEQ ID NO: 566 - protein, 10 aa, Synthetic construct
RWLSTLEISG

SEQ ID NO: 567 - protein, 287 aa, Synthetic construct
MAEIGTGFPFDPHYVEVLGERMHYVDVGPRDGTPVLFLHGNPTSSYVWRNIIPHVAPTHRCIAPDLIGMGKSDKPDLGYFFDDHVRFMDAFIEALGLEEVVLVIHDWGSALGFHWAKRNPERVKGIAFMEFIRPIPTWDEWPEFARETFQAFRTTDVGRKLIIDQNVFIEGTLPMGVVRPLTEVEMDHYREPFLNPVDREPLWRFPNELPIAGEPANIVALVEEYMDWLHQSPVPKLLFWGTPGVLIPPAEAARLAKSLPNCKAVDIGPGLNLLQEDNPDLIGSEIA

SEQ ID NO: 568 - protein, 9 aa, Synthetic construct
WLSTLEISG

SEQ ID NO: 569 - protein, 288 aa, Synthetic construct
MAEIGTGFPFDPHYVEVLGERMHYVDVGPRDGTPVLFLHGNPTSSYVWRNIIPHVAPTHRCIAPDLIGMGKSDKPDLGYFFDDHVRFMDAFIEALGLEEVVLVIHDWGSALGFHWAKRNPERVKGIAFMEFIRPIPTWDEWPEFARETFQAFRTTDVGRKLIIDQNVFIEGTLPMGVVRPLTEVEMDHYREPFLNPVDREPLWRFPNELPIAGEPANIVALVEEYMDWLHQSPVPKLLFWGTPGVLIPPAEAARLAKSLPNCKAVDIGPGLNLLQEDNPDLIGSEIAR

SEQ ID NO: 570 - protein, 8 aa, Synthetic construct
LSTLEISG

SEQ ID NO: 571 - protein, 289 aa, Synthetic construct
MAEIGTGFPFDPHYVEVLGERMHYVDVGPRDGTPVLFLHGNPTSSYVWRNIIPHVAPTHRCIAPDLIGMGKSDKPDLGYFFDDHVRFMDAFIEALGLEEVVLVIHDWGSALGFHWAKRNPERVKGIAFMEFIRPIPTWDEWPEFARETFQAFRTTDVGRKLIIDQNVFIEGTLPMGVVRPLTEVEMDHYREPFLNPVDREPLWRFPNELPIAGEPANIVALVEEYMDWLHQSPVPKLLFWGTPGVLIPPAEAARLAKSLPNCKAVDIGPGLNLLQEDNPDLIGSEIARW

SEQ ID NO: 572 - protein, 7 aa, Synthetic construct
STLEISG

SEQ ID NO: 573 - protein, 290 aa, Synthetic construct
MAEIGTGFPFDPHYVEVLGERMHYVDVGPRDGTPVLFLHGNPTSSYVWRNIIPHVAPTHRCIAPDLIGMGKSDKPDLGYFFDDHVRFMDAFIEALGLEEVVLVIHDWGSALGFHWAKRNPERVKGIAFMEFIRPIPTWDEWPEFARETFQAFRTTDVGRKLIIDQNVFIEGTLPMGVVRPLTEVEMDHYREPFLNPVDREPLWRFPNELPIAGEPANIVALVEEYMDWLHQSPVPKLLFWGTPGVLIPPAEAARLAKSLPNCKAVDIGPGLNLLQEDNPDLIGSEIARWL

SEQ ID NO: 574 - protein, 6 aa, Synthetic construct
TLEISG

SEQ ID NO: 575 - protein, 291 aa, Synthetic construct
MAEIGTGFPFDPHYVEVLGERMHYVDVGPRDGTPVLFLHGNPTSSYVWRNIIPHVAPTHRCIAPDLIGMGKSDKPDLGYFFDDHVRFMDAFIEALGLEEVVLVIHDWGSALGFHWAKRNPERVKGIAFMEFIRPIPTWDEWPEFARETFQAFRTTDVGRKLIIDQNVFIEGTLPMGVVRPLTEVEMDHYREPFLNPVDREPLWRFPNELPIAGEPANIVALVEEYMDWLHQSPVPKLLFWGTPGVLIPPAEAARLAKSLPNCKAVDIGPGLNLLQEDNPDLIGSEIARWLS

SEQ ID NO: 576 - protein, 5 aa, Synthetic construct
LEISG

SEQ ID NO: 577 - protein, 292 aa, Synthetic construct
MAEIGTGFPFDPHYVEVLGERMHYVDVGPRDGTPVLFLHGNPTSSYVWRNIIPHVAPTHRCIAPDLIGMGKSDKPDLGYFFDDHVRFMDAFIEALGLEEVVLVIHDWGSALGFHWAKRNPERVKGIAFMEFIRPIPTWDEWPEFARETFQAFRTTDVGRKLIIDQNVFIEGTLPMGVVRPLTEVEMDHYREPFLNPVDREPLWRFPNELPIAGEPANIVALVEEYMDWLHQSPVPKLLFWGTPGVLIPPAEAARLAKSLPNCKAVDIGPGLNLLQEDNPDLIGSEIARWLST

SEQ ID NO: 578 - protein, 17 aa, Synthetic construct
EIGTGFPFDPHYVEVLG

SEQ ID NO: 579 - protein, 17 aa, Synthetic construct
AIGTGFPFDPHYVEVLG

SEQ ID NO: 580 - protein, 17 aa, Synthetic construct
CIGTGFPFDPHYVEVLG

SEQ ID NO: 581 - protein, 17 aa, Synthetic construct
DIGTGFPFDPHYVEVLG

SEQ ID NO: 582 - protein, 17 aa, Synthetic construct
GIGTGFPFDPHYVEVLG

SEQ ID NO: 583 - protein, 17 aa, Synthetic construct
FIGTGFPFDPHYVEVLG

SEQ ID NO: 584 - protein, 17 aa, Synthetic construct
IIGTGFPFDPHYVEVLG

SEQ ID NO: 585 - protein, 17 aa, Synthetic construct
HIGTGFPFDPHYVEVLG

SEQ ID NO: 586 - protein, 17 aa, Synthetic construct
KIGTGFPFDPHYVEVLG

SEQ ID NO: 587 - protein, 17 aa, Synthetic construct
MIGTGFPFDPHYVEVLG

SEQ ID NO: 588 - protein, 17 aa, Synthetic construct
LIGTGFPFDPHYVEVLG

SEQ ID NO: 589 - protein, 17 aa, Synthetic construct
NIGTGFPFDPHYVEVLG

SEQ ID NO: 590 - protein, 17 aa, Synthetic construct
PIGTGFPFDPHYVEVLG

SEQ ID NO: 591 - protein, 17 aa, Synthetic construct
QIGTGFPFDPHYVEVLG

SEQ ID NO: 592 - protein, 17 aa, Synthetic construct
SIGTGFPFDPHYVEVLG

SEQ ID NO: 593 - protein, 17 aa, Synthetic construct
RIGTGFPFDPHYVEVLG

SEQ ID NO: 594 - protein, 17 aa, Synthetic construct
TIGTGFPFDPHYVEVLG

SEQ ID NO: 595 - protein, 17 aa, Synthetic construct
WIGTGFPFDPHYVEVLG

SEQ ID NO: 596 - protein, 17 aa, Synthetic construct
VIGTGFPFDPHYVEVLG

SEQ ID NO: 597 - protein, 17 aa, Synthetic construct
YIGTGFPFDPHYVEVLG

SEQ ID NO: 598 - protein, 17 aa, Synthetic construct
EAGTGFPFDPHYVEVLG

SEQ ID NO: 599 - protein, 17 aa, Synthetic construct
ECGTGFPFDPHYVEVLG

SEQ ID NO: 600 - protein, 17 aa, Synthetic construct
EEGTGFPFDPHYVEVLG

SEQ ID NO: 601 - protein, 17 aa, Synthetic construct
EDGTGFPFDPHYVEVLG

SEQ ID NO: 602 - protein, 17 aa, Synthetic construct
EGGTGFPFDPHYVEVLG

SEQ ID NO: 603 - protein, 17 aa, Synthetic construct
EFGTGFPFDPHYVEVLG

SEQ ID NO: 604 - protein, 17 aa, Synthetic construct
EHGTGFPFDPHYVEVLG

SEQ ID NO: 605 - protein, 17 aa, Synthetic construct
EKGTGFPFDPHYVEVLG

SEQ ID NO: 606 - protein, 17 aa, Synthetic construct
EMGTGFPFDPHYVEVLG

SEQ ID NO: 607 - protein, 17 aa, Synthetic construct
ELGTGFPFDPHYVEVLG

SEQ ID NO: 608 - protein, 17 aa, Synthetic construct
ENGTGFPFDPHYVEVLG

SEQ ID NO: 609 - protein, 17 aa, Synthetic construct
EPGTGFPFDPHYVEVLG

SEQ ID NO: 610 - protein, 17 aa, Synthetic construct
EQGTGFPFDPHYVEVLG

SEQ ID NO: 611 - protein, 17 aa, Synthetic construct
ESGTGFPFDPHYVEVLG

SEQ ID NO: 612 - protein, 17 aa, Synthetic construct
ERGTGFPFDPHYVEVLG

SEQ ID NO: 613 - protein, 17 aa, Synthetic construct
ETGTGFPFDPHYVEVLG

SEQ ID NO: 614 - protein, 17 aa, Synthetic construct
EWGTGFPFDPHYVEVLG

SEQ ID NO: 615 - protein, 17 aa, Synthetic construct
EVGTGFPFDPHYVEVLG

SEQ ID NO: 616 - protein, 17 aa, Synthetic construct
EYGTGFPFDPHYVEVLG

SEQ ID NO: 617 - protein, 17 aa, Synthetic construct
EIATGFPFDPHYVEVLG

SEQ ID NO: 618 - protein, 17 aa, Synthetic construct
EICTGFPFDPHYVEVLG

SEQ ID NO: 619 - protein, 17 aa, Synthetic construct
EIETGFPFDPHYVEVLG

SEQ ID NO: 620 - protein, 17 aa, Synthetic construct
EIDTGFPFDPHYVEVLG

SEQ ID NO: 621 - protein, 17 aa, Synthetic construct
EIFTGFPFDPHYVEVLG

SEQ ID NO: 622 - protein, 17 aa, Synthetic construct
EIITGFPFDPHYVEVLG

SEQ ID NO: 623 - protein, 17 aa, Synthetic construct
EIHTGFPFDPHYVEVLG

SEQ ID NO: 624 - protein, 17 aa, Synthetic construct
EIKTGFPFDPHYVEVLG

SEQ ID NO: 625 - protein, 17 aa, Synthetic construct
EIMTGFPFDPHYVEVLG

SEQ ID NO: 626 - protein, 17 aa, Synthetic construct
EILTGFPFDPHYVEVLG

SEQ ID NO: 627 - protein, 17 aa, Synthetic construct
EINTGFPFDPHYVEVLG

SEQ ID NO: 628 - protein, 17 aa, Synthetic construct
EIPTGFPFDPHYVEVLG

SEQ ID NO: 629 - protein, 17 aa, Synthetic construct
EIQTGFPFDPHYVEVLG

SEQ ID NO: 630 - protein, 17 aa, Synthetic construct
EISTGFPFDPHYVEVLG

SEQ ID NO: 631 - protein, 17 aa, Synthetic construct
EIRTGFPFDPHYVEVLG

SEQ ID NO: 632 - protein, 17 aa, Synthetic construct
EITTGFPFDPHYVEVLG

SEQ ID NO: 633 - protein, 17 aa, Synthetic construct
EIWTGFPFDPHYVEVLG

SEQ ID NO: 634 - protein, 17 aa, Synthetic construct
EIVTGFPFDPHYVEVLG

SEQ ID NO: 635 - protein, 17 aa, Synthetic construct
EIYTGFPFDPHYVEVLG

SEQ ID NO: 636 - protein, 17 aa, Synthetic construct
EIGAGFPFDPHYVEVLG

SEQ ID NO: 637 - protein, 17 aa, Synthetic construct
EIGCGFPFDPHYVEVLG

SEQ ID NO: 638 - protein, 17 aa, Synthetic construct
EIGEGFPFDPHYVEVLG

SEQ ID NO: 639 - protein, 17 aa, Synthetic construct
EIGDGFPFDPHYVEVLG

SEQ ID NO: 640 - protein, 17 aa, Synthetic construct
EIGGGFPFDPHYVEVLG

SEQ ID NO: 641 - protein, 17 aa, Synthetic construct
EIGFGFPFDPHYVEVLG

SEQ ID NO: 642 - protein, 17 aa, Synthetic construct
EIGIGFPFDPHYVEVLG

SEQ ID NO: 643 - protein, 17 aa, Synthetic construct
EIGHGFPFDPHYVEVLG

SEQ ID NO: 644 - protein, 17 aa, Synthetic construct
EIGKGFPFDPHYVEVLG

SEQ ID NO: 645 - protein, 17 aa, Synthetic construct
EIGMGFPFDPHYVEVLG

SEQ ID NO: 646 - protein, 17 aa, Synthetic construct
EIGLGFPFDPHYVEVLG

SEQ ID NO: 647 - protein, 17 aa, Synthetic construct
EIGNGFPFDPHYVEVLG

SEQ ID NO: 648 - protein, 17 aa, Synthetic construct
EIGPGFPFDPHYVEVLG

SEQ ID NO: 649 - protein, 17 aa, Synthetic construct
EIGQGFPFDPHYVEVLG

SEQ ID NO: 650 - protein, 17 aa, Synthetic construct
EIGSGFPFDPHYVEVLG

SEQ ID NO: 651 - protein, 17 aa, Synthetic construct
EIGRGFPFDPHYVEVLG

SEQ ID NO: 652 - protein, 17 aa, Synthetic construct
EIGWGFPFDPHYVEVLG

SEQ ID NO: 653 - protein, 17 aa, Synthetic construct
EIGVGFPFDPHYVEVLG

SEQ ID NO: 654 - protein, 17 aa, Synthetic construct
EIGYGFPFDPHYVEVLG

SEQ ID NO: 655 - protein, 17 aa, Synthetic construct
EIGTAFPFDPHYVEVLG

SEQ ID NO: 656 - protein, 17 aa, Synthetic construct
EIGTCFPFDPHYVEVLG

SEQ ID NO: 657 - protein, 17 aa, Synthetic construct
EIGTEFPFDPHYVEVLG

SEQ ID NO: 658 - protein, 17 aa, Synthetic construct
EIGTDFPFDPHYVEVLG

SEQ ID NO: 659 - protein, 17 aa, Synthetic construct
EIGTFFPFDPHYVEVLG

SEQ ID NO: 660 - protein, 17 aa, Synthetic construct
EIGTIFPFDPHYVEVLG

SEQ ID NO: 661 - protein, 17 aa, Synthetic construct
EIGTHFPFDPHYVEVLG

SEQ ID NO: 662 - protein, 17 aa, Synthetic construct
EIGTKFPFDPHYVEVLG

SEQ ID NO: 663 - protein, 17 aa, Synthetic construct
EIGTMFPFDPHYVEVLG

SEQ ID NO: 664 - protein, 17 aa, Synthetic construct
EIGTLFPFDPHYVEVLG

SEQ ID NO: 665 - protein, 17 aa, Synthetic construct
EIGTNFPFDPHYVEVLG

SEQ ID NO: 666 - protein, 17 aa, Synthetic construct
EIGTPFPFDPHYVEVLG

SEQ ID NO: 667 - protein, 17 aa, Synthetic construct
EIGTQFPFDPHYVEVLG

SEQ ID NO: 668 - protein, 17 aa, Synthetic construct
EIGTSFPFDPHYVEVLG

SEQ ID NO: 669 - protein, 17 aa, Synthetic construct
EIGTRFPFDPHYVEVLG

SEQ ID NO: 670 - protein, 17 aa, Synthetic construct
EIGTTFPFDPHYVEVLG

SEQ ID NO: 671 - protein, 17 aa, Synthetic construct
EIGTWFPFDPHYVEVLG

SEQ ID NO: 672 - protein, 17 aa, Synthetic construct
EIGTVFPFDPHYVEVLG

SEQ ID NO: 673 - protein, 17 aa, Synthetic construct
EIGTYFPFDPHYVEVLG

SEQ ID NO: 674 - protein, 17 aa, Synthetic construct
EIGTGAPFDPHYVEVLG

SEQ ID NO: 675 - protein, 17 aa, Synthetic construct
EIGTGCPFDPHYVEVLG

SEQ ID NO: 676 - protein, 17 aa, Synthetic construct
EIGTGEPFDPHYVEVLG

SEQ ID NO: 677 - protein, 17 aa, Synthetic construct
EIGTGDPFDPHYVEVLG

SEQ ID NO: 678 - protein, 17 aa, Synthetic construct
EIGTGGPFDPHYVEVLG

SEQ ID NO: 679 - protein, 17 aa, Synthetic construct
EIGTGIPFDPHYVEVLG

SEQ ID NO: 680 - protein, 17 aa, Synthetic construct
EIGTGHPFDPHYVEVLG

SEQ ID NO: 681 - protein, 17 aa, Synthetic construct
EIGTGKPFDPHYVEVLG

SEQ ID NO: 682 - protein, 17 aa, Synthetic construct
EIGTGMPFDPHYVEVLG

SEQ ID NO: 683 - protein, 17 aa, Synthetic construct
EIGTGLPFDPHYVEVLG

SEQ ID NO: 684 - protein, 17 aa, Synthetic construct
EIGTGNPFDPHYVEVLG

SEQ ID NO: 685 - protein, 17 aa, Synthetic construct
EIGTGPPFDPHYVEVLG

SEQ ID NO: 686 - protein, 17 aa, Synthetic construct
EIGTGQPFDPHYVEVLG

SEQ ID NO: 687 - protein, 17 aa, Synthetic construct
EIGTGSPFDPHYVEVLG

SEQ ID NO: 688 - protein, 17 aa, Synthetic construct
EIGTGRPFDPHYVEVLG

SEQ ID NO: 689 - protein, 17 aa, Synthetic construct
EIGTGTPFDPHYVEVLG

SEQ ID NO: 690 - protein, 17 aa, Synthetic construct
EIGTGWPFDPHYVEVLG

SEQ ID NO: 691 - protein, 17 aa, Synthetic construct
EIGTGVPFDPHYVEVLG

SEQ ID NO: 692 - protein, 17 aa, Synthetic construct
EIGTGYPFDPHYVEVLG

SEQ ID NO: 693 - protein, 17 aa, Synthetic construct
EIGTGFAFDPHYVEVLG

SEQ ID NO: 694 - protein, 17 aa, Synthetic construct
EIGTGFCFDPHYVEVLG

SEQ ID NO: 695 - protein, 17 aa, Synthetic construct
EIGTGFEFDPHYVEVLG

SEQ ID NO: 696 - protein, 17 aa, Synthetic construct
EIGTGFDFDPHYVEVLG

SEQ ID NO: 697 - protein, 17 aa, Synthetic construct
EIGTGFGFDPHYVEVLG

SEQ ID NO: 698 - protein, 17 aa, Synthetic construct
EIGTGFFFDPHYVEVLG

SEQ ID NO: 699 - protein, 17 aa, Synthetic construct
EIGTGFIFDPHYVEVLG

SEQ ID NO: 700 - protein, 17 aa, Synthetic construct
EIGTGFHFDPHYVEVLG

SEQ ID NO: 701 - protein, 17 aa, Synthetic construct
EIGTGFKFDPHYVEVLG

SEQ ID NO: 702 - protein, 17 aa, Synthetic construct
EIGTGFMFDPHYVEVLG

SEQ ID NO: 703 - protein, 17 aa, Synthetic construct
EIGTGFLFDPHYVEVLG

SEQ ID NO: 704 - protein, 17 aa, Synthetic construct
EIGTGFNFDPHYVEVLG

SEQ ID NO: 705 - protein, 17 aa, Synthetic construct
EIGTGFQFDPHYVEVLG

SEQ ID NO: 706 - protein, 17 aa, Synthetic construct
EIGTGFSFDPHYVEVLG

SEQ ID NO: 707 - protein, 17 aa, Synthetic construct
EIGTGFRFDPHYVEVLG

SEQ ID NO: 708 - protein, 17 aa, Synthetic construct
EIGTGFTFDPHYVEVLG

SEQ ID NO: 709 - protein, 17 aa, Synthetic construct
EIGTGFWFDPHYVEVLG

SEQ ID NO: 710 - protein, 17 aa, Synthetic construct
EIGTGFVFDPHYVEVLG

SEQ ID NO: 711 - protein, 17 aa, Synthetic construct
EIGTGFYFDPHYVEVLG

SEQ ID NO: 712 - protein, 17 aa, Synthetic construct
EIGTGFPADPHYVEVLG

SEQ ID NO: 713 - protein, 17 aa, Synthetic construct
EIGTGFPCDPHYVEVLG

SEQ ID NO: 714 - protein, 17 aa, Synthetic construct
EIGTGFPEDPHYVEVLG

SEQ ID NO: 715 - protein, 17 aa, Synthetic construct
EIGTGFPDDPHYVEVLG

SEQ ID NO: 716 - protein, 17 aa, Synthetic construct
EIGTGFPGDPHYVEVLG

SEQ ID NO: 717 - protein, 17 aa, Synthetic construct
EIGTGFPIDPHYVEVLG

SEQ ID NO: 718 - protein, 17 aa, Synthetic construct
EIGTGFPHDPHYVEVLG

SEQ ID NO: 719 - protein, 17 aa, Synthetic construct
EIGTGFPKDPHYVEVLG

SEQ ID NO: 720 - protein, 17 aa, Synthetic construct
EIGTGFPMDPHYVEVLG

SEQ ID NO: 721 - protein, 17 aa, Synthetic construct
EIGTGFPLDPHYVEVLG

SEQ ID NO: 722 - protein, 17 aa, Synthetic construct
EIGTGFPNDPHYVEVLG

SEQ ID NO: 723 - protein, 17 aa, Synthetic construct
EIGTGFPPDPHYVEVLG

SEQ ID NO: 724 - protein, 17 aa, Synthetic construct
EIGTGFPQDPHYVEVLG

SEQ ID NO: 725 - protein, 17 aa, Synthetic construct
EIGTGFPSDPHYVEVLG

SEQ ID NO: 726 - protein, 17 aa, Synthetic construct
EIGTGFPRDPHYVEVLG

SEQ ID NO: 727 - protein, 17 aa, Synthetic construct
EIGTGFPTDPHYVEVLG

SEQ ID NO: 728 - protein, 17 aa, Synthetic construct
EIGTGFPWDPHYVEVLG

SEQ ID NO: 729 - protein, 17 aa, Synthetic construct
EIGTGFPVDPHYVEVLG

SEQ ID NO: 730 - protein, 17 aa, Synthetic construct
EIGTGFPYDPHYVEVLG

SEQ ID NO: 731 - protein, 17 aa, Synthetic construct
EIGTGFPFAPHYVEVLG

SEQ ID NO: 732 - protein, 17 aa, Synthetic construct
EIGTGFPFCPHYVEVLG

SEQ ID NO: 733 - protein, 17 aa, Synthetic construct
EIGTGFPFEPHYVEVLG

SEQ ID NO: 734 - protein, 17 aa, Synthetic construct
EIGTGFPFGPHYVEVLG

SEQ ID NO: 735 - protein, 17 aa, Synthetic construct
EIGTGFPFFPHYVEVLG

SEQ ID NO: 736 - protein, 17 aa, Synthetic construct
EIGTGFPFIPHYVEVLG

SEQ ID NO: 737 - protein, 17 aa, Synthetic construct
EIGTGFPFHPHYVEVLG

SEQ ID NO: 738 - protein, 17 aa, Synthetic construct
EIGTGFPFKPHYVEVLG

SEQ ID NO: 739 - protein, 17 aa, Synthetic construct
EIGTGFPFMPHYVEVLG

SEQ ID NO: 740 - protein, 17 aa, Synthetic construct
EIGTGFPFLPHYVEVLG

SEQ ID NO: 741 - protein, 17 aa, Synthetic construct
EIGTGFPFNPHYVEVLG

SEQ ID NO: 742 - protein, 17 aa, Synthetic construct
EIGTGFPFPPHYVEVLG

SEQ ID NO: 743 - protein, 17 aa, Synthetic construct
EIGTGFPFQPHYVEVLG

SEQ ID NO: 744 - protein, 17 aa, Synthetic construct
EIGTGFPFSPHYVEVLG

SEQ ID NO: 745 - protein, 17 aa, Synthetic construct
EIGTGFPFRPHYVEVLG

SEQ ID NO: 746 - protein, 17 aa, Synthetic construct
EIGTGFPFTPHYVEVLG

SEQ ID NO: 747 - protein, 17 aa, Synthetic construct
EIGTGFPFWPHYVEVLG

SEQ ID NO: 748 - protein, 17 aa, Synthetic construct
EIGTGFPFVPHYVEVLG

SEQ ID NO: 749 - protein, 17 aa, Synthetic construct
EIGTGFPFYPHYVEVLG

SEQ ID NO: 750 - protein, 17 aa, Synthetic construct
EIGTGFPFDAHYVEVLG

SEQ ID NO: 751 - protein, 17 aa, Synthetic construct
EIGTGFPFDCHYVEVLG

SEQ ID NO: 752 - protein, 17 aa, Synthetic construct
EIGTGFPFDEHYVEVLG

SEQ ID NO: 753 - protein, 17 aa, Synthetic construct
EIGTGFPFDDHYVEVLG

SEQ ID NO: 754 - protein, 17 aa, Synthetic construct
EIGTGFPFDGHYVEVLG

SEQ ID NO: 755 - protein, 17 aa, Synthetic construct
EIGTGFPFDFHYVEVLG

SEQ ID NO: 756 - protein, 17 aa, Synthetic construct
EIGTGFPFDIHYVEVLG

SEQ ID NO: 757 - protein, 17 aa, Synthetic construct
EIGTGFPFDHHYVEVLG

SEQ ID NO: 758 - protein, 17 aa, Synthetic construct
EIGTGFPFDKHYVEVLG

SEQ ID NO: 759 - protein, 17 aa, Synthetic construct
EIGTGFPFDMHYVEVLG

SEQ ID NO: 760 - protein, 17 aa, Synthetic construct
EIGTGFPFDLHYVEVLG

SEQ ID NO: 761 - protein, 17 aa, Synthetic construct
EIGTGFPFDNHYVEVLG

SEQ ID NO: 762 - protein, 17 aa, Synthetic construct
EIGTGFPFDQHYVEVLG

SEQ ID NO: 763 - protein, 17 aa, Synthetic construct
EIGTGFPFDSHYVEVLG

SEQ ID NO: 764 - protein, 17 aa, Synthetic construct
EIGTGFPFDRHYVEVLG

SEQ ID NO: 765 - protein, 17 aa, Synthetic construct
EIGTGFPFDTHYVEVLG

SEQ ID NO: 766 - protein, 17 aa, Synthetic construct
EIGTGFPFDWHYVEVLG

SEQ ID NO: 767 - protein, 17 aa, Synthetic construct
EIGTGFPFDVHYVEVLG

SEQ ID NO: 768 - protein, 17 aa, Synthetic construct
EIGTGFPFDYHYVEVLG

SEQ ID NO: 769 - protein, 17 aa, Synthetic construct
EIGTGFPFDPAYVEVLG

SEQ ID NO: 770 - protein, 17 aa, Synthetic construct
EIGTGFPFDPCYVEVLG

SEQ ID NO: 771 - protein, 17 aa, Synthetic construct
EIGTGFPFDPEYVEVLG

SEQ ID NO: 772 - protein, 17 aa, Synthetic construct
EIGTGFPFDPDYVEVLG

SEQ ID NO: 773 - protein, 17 aa, Synthetic construct
EIGTGFPFDPGYVEVLG

SEQ ID NO: 774 - protein, 17 aa, Synthetic construct
EIGTGFPFDPFYVEVLG

SEQ ID NO: 775 - protein, 17 aa, Synthetic construct
EIGTGFPFDPIYVEVLG

SEQ ID NO: 776 - protein, 17 aa, Synthetic construct
EIGTGFPFDPKYVEVLG

SEQ ID NO: 777 - protein, 17 aa, Synthetic construct
EIGTGFPFDPMYVEVLG

SEQ ID NO: 778 - protein, 17 aa, Synthetic construct
EIGTGFPFDPLYVEVLG

SEQ ID NO: 779 - protein, 17 aa, Synthetic construct
EIGTGFPFDPNYVEVLG

SEQ ID NO: 780 - protein, 17 aa, Synthetic construct
EIGTGFPFDPPYVEVLG

SEQ ID NO: 781 - protein, 17 aa, Synthetic construct
EIGTGFPFDPQYVEVLG

SEQ ID NO: 782 - protein, 17 aa, Synthetic construct
EIGTGFPFDPSYVEVLG

SEQ ID NO: 783 - protein, 17 aa, Synthetic construct
EIGTGFPFDPRYVEVLG

SEQ ID NO: 784 - protein, 17 aa, Synthetic construct
EIGTGFPFDPTYVEVLG

SEQ ID NO: 785 - protein, 17 aa, Synthetic construct
EIGTGFPFDPWYVEVLG

SEQ ID NO: 786 - protein, 17 aa, Synthetic construct
EIGTGFPFDPVYVEVLG

SEQ ID NO: 787 - protein, 17 aa, Synthetic construct
EIGTGFPFDPYYVEVLG

SEQ ID NO: 788 - protein, 17 aa, Synthetic construct
EIGTGFPFDPHAVEVLG

SEQ ID NO: 789 - protein, 17 aa, Synthetic construct
EIGTGFPFDPHCVEVLG

SEQ ID NO: 790 - protein, 17 aa, Synthetic construct
EIGTGFPFDPHEVEVLG

SEQ ID NO: 791 - protein, 17 aa, Synthetic construct
EIGTGFPFDPHDVEVLG

SEQ ID NO: 792 - protein, 17 aa, Synthetic construct
EIGTGFPFDPHGVEVLG

SEQ ID NO: 793 - protein, 17 aa, Synthetic construct
EIGTGFPFDPHFVEVLG

SEQ ID NO: 794 - protein, 17 aa, Synthetic construct
EIGTGFPFDPHIVEVLG

SEQ ID NO: 795 - protein, 17 aa, Synthetic construct
EIGTGFPFDPHHVEVLG

SEQ ID NO: 796 - protein, 17 aa, Synthetic construct
EIGTGFPFDPHKVEVLG

SEQ ID NO: 797 - protein, 17 aa, Synthetic construct
EIGTGFPFDPHMVEVLG

SEQ ID NO: 798 - protein, 17 aa, Synthetic construct
EIGTGFPFDPHLVEVLG

SEQ ID NO: 799 - protein, 17 aa, Synthetic construct
EIGTGFPFDPHNVEVLG

SEQ ID NO: 800 - protein, 17 aa, Synthetic construct
EIGTGFPFDPHPVEVLG

SEQ ID NO: 801 - protein, 17 aa, Synthetic construct
EIGTGFPFDPHQVEVLG

SEQ ID NO: 802 - protein, 17 aa, Synthetic construct
EIGTGFPFDPHSVEVLG

SEQ ID NO: 803 - protein, 17 aa, Synthetic construct
EIGTGFPFDPHRVEVLG

SEQ ID NO: 804 - protein, 17 aa, Synthetic construct
EIGTGFPFDPHTVEVLG

SEQ ID NO: 805 - protein, 17 aa, Synthetic construct
EIGTGFPFDPHWVEVLG

SEQ ID NO: 806 - protein, 17 aa, Synthetic construct
EIGTGFPFDPHVVEVLG

SEQ ID NO: 807 - protein, 17 aa, Synthetic construct
EIGTGFPFDPHYAEVLG

SEQ ID NO: 808 - protein, 17 aa, Synthetic construct
EIGTGFPFDPHYCEVLG

SEQ ID NO: 809 - protein, 17 aa, Synthetic construct
EIGTGFPFDPHYEEVLG

SEQ ID NO: 810 - protein, 17 aa, Synthetic construct
EIGTGFPFDPHYDEVLG

SEQ ID NO: 811 - protein, 17 aa, Synthetic construct
EIGTGFPFDPHYGEVLG

SEQ ID NO: 812 - protein, 17 aa, Synthetic construct
EIGTGFPFDPHYFEVLG

SEQ ID NO: 813 - protein, 17 aa, Synthetic construct
EIGTGFPFDPHYIEVLG

SEQ ID NO: 814 - protein, 17 aa, Synthetic construct
EIGTGFPFDPHYHEVLG

SEQ ID NO: 815 - protein, 17 aa, Synthetic construct
EIGTGFPFDPHYKEVLG

SEQ ID NO: 816 - protein, 17 aa, Synthetic construct
EIGTGFPFDPHYMEVLG

SEQ ID NO: 817 - protein, 17 aa, Synthetic construct
EIGTGFPFDPHYLEVLG

SEQ ID NO: 818 - protein, 17 aa, Synthetic construct
EIGTGFPFDPHYNEVLG

SEQ ID NO: 819 - protein, 17 aa, Synthetic construct
EIGTGFPFDPHYPEVLG

SEQ ID NO: 820 - protein, 17 aa, Synthetic construct
EIGTGFPFDPHYQEVLG

SEQ ID NO: 821 - protein, 17 aa, Synthetic construct
EIGTGFPFDPHYSEVLG

SEQ ID NO: 822 - protein, 17 aa, Synthetic construct
EIGTGFPFDPHYREVLG

SEQ ID NO: 823 - protein, 17 aa, Synthetic construct
EIGTGFPFDPHYTEVLG

SEQ ID NO: 824 - protein, 17 aa, Synthetic construct
EIGTGFPFDPHYWEVLG

SEQ ID NO: 825 - protein, 17 aa, Synthetic construct
EIGTGFPFDPHYYEVLG

SEQ ID NO: 826 - protein, 17 aa, Synthetic construct
EIGTGFPFDPHYVAVLG

SEQ ID NO: 827 - protein, 17 aa, Synthetic construct
EIGTGFPFDPHYVCVLG

SEQ ID NO: 828 - protein, 17 aa, Synthetic construct
EIGTGFPFDPHYVDVLG

SEQ ID NO: 829 - protein, 17 aa, Synthetic construct
EIGTGFPFDPHYVGVLG

SEQ ID NO: 830 - protein, 17 aa, Synthetic construct
EIGTGFPFDPHYVFVLG

SEQ ID NO: 831 - protein, 17 aa, Synthetic construct
EIGTGFPFDPHYVIVLG

SEQ ID NO: 832 - protein, 17 aa, Synthetic construct
EIGTGFPFDPHYVHVLG

SEQ ID NO: 833 - protein, 17 aa, Synthetic construct
EIGTGFPFDPHYVKVLG

SEQ ID NO: 834 - protein, 17 aa, Synthetic construct
EIGTGFPFDPHYVMVLG

SEQ ID NO: 835 - protein, 17 aa, Synthetic construct
EIGTGFPFDPHYVLVLG

SEQ ID NO: 836 - protein, 17 aa, Synthetic construct
EIGTGFPFDPHYVNVLG

SEQ ID NO: 837 - protein, 17 aa, Synthetic construct
EIGTGFPFDPHYVPVLG

SEQ ID NO: 838 - protein, 17 aa, Synthetic construct
EIGTGFPFDPHYVQVLG

SEQ ID NO: 839 - protein, 17 aa, Synthetic construct
EIGTGFPFDPHYVSVLG

SEQ ID NO: 840 - protein, 17 aa, Synthetic construct
EIGTGFPFDPHYVRVLG

SEQ ID NO: 841 - protein, 17 aa, Synthetic construct
EIGTGFPFDPHYVTVLG

SEQ ID NO: 842 - protein, 17 aa, Synthetic construct
EIGTGFPFDPHYVWVLG

SEQ ID NO: 843 - protein, 17 aa, Synthetic construct
EIGTGFPFDPHYVVVLG

SEQ ID NO: 844 - protein, 17 aa, Synthetic construct
EIGTGFPFDPHYVYVLG

SEQ ID NO: 845 - protein, 17 aa, Synthetic construct
EIGTGFPFDPHYVEALG

SEQ ID NO: 846 - protein, 17 aa, Synthetic construct
EIGTGFPFDPHYVECLG

SEQ ID NO: 847 - protein, 17 aa, Synthetic construct
EIGTGFPFDPHYVEELG

SEQ ID NO: 848 - protein, 17 aa, Synthetic construct
EIGTGFPFDPHYVEDLG

SEQ ID NO: 849 - protein, 17 aa, Synthetic construct
EIGTGFPFDPHYVEGLG

SEQ ID NO: 850 - protein, 17 aa, Synthetic construct
EIGTGFPFDPHYVEFLG

SEQ ID NO: 851 - protein, 17 aa, Synthetic construct
EIGTGFPFDPHYVEILG

SEQ ID NO: 852 - protein, 17 aa, Synthetic construct
EIGTGFPFDPHYVEHLG

SEQ ID NO: 853 - protein, 17 aa, Synthetic construct
EIGTGFPFDPHYVEKLG

SEQ ID NO: 854 - protein, 17 aa, Synthetic construct
EIGTGFPFDPHYVEMLG

SEQ ID NO: 855 - protein, 17 aa, Synthetic construct
EIGTGFPFDPHYVELLG

SEQ ID NO: 856 - protein, 17 aa, Synthetic construct
EIGTGFPFDPHYVENLG

SEQ ID NO: 857 - protein, 17 aa, Synthetic construct
EIGTGFPFDPHYVEPLG

SEQ ID NO: 858 - protein, 17 aa, Synthetic construct
EIGTGFPFDPHYVEQLG

SEQ ID NO: 859 - protein, 17 aa, Synthetic construct
EIGTGFPFDPHYVESLG

SEQ ID NO: 860 - protein, 17 aa, Synthetic construct
EIGTGFPFDPHYVERLG

SEQ ID NO: 861 - protein, 17 aa, Synthetic construct
EIGTGFPFDPHYVETLG

SEQ ID NO: 862 - protein, 17 aa, Synthetic construct
EIGTGFPFDPHYVEWLG

SEQ ID NO: 863 - protein, 17 aa, Synthetic construct
EIGTGFPFDPHYVEYLG

SEQ ID NO: 864 - protein, 17 aa, Synthetic construct
EIGTGFPFDPHYVEVAG

SEQ ID NO: 865 - protein, 17 aa, Synthetic construct
EIGTGFPFDPHYVEVCG

SEQ ID NO: 866 - protein, 17 aa, Synthetic construct
EIGTGFPFDPHYVEVEG

SEQ ID NO: 867 - protein, 17 aa, Synthetic construct
EIGTGFPFDPHYVEVDG

SEQ ID NO: 868 - protein, 17 aa, Synthetic construct
EIGTGFPFDPHYVEVGG

SEQ ID NO: 869 - protein, 17 aa, Synthetic construct
EIGTGFPFDPHYVEVFG

SEQ ID NO: 870 - protein, 17 aa, Synthetic construct
EIGTGFPFDPHYVEVIG

SEQ ID NO: 871 - protein, 17 aa, Synthetic construct
EIGTGFPFDPHYVEVHG

SEQ ID NO: 872 - protein, 17 aa, Synthetic construct
EIGTGFPFDPHYVEVKG

SEQ ID NO: 873 - protein, 17 aa, Synthetic construct
EIGTGFPFDPHYVEVMG

SEQ ID NO: 874 - protein, 17 aa, Synthetic construct
EIGTGFPFDPHYVEVNG

SEQ ID NO: 875 - protein, 17 aa, Synthetic construct
EIGTGFPFDPHYVEVPG

SEQ ID NO: 876 - protein, 17 aa, Synthetic construct
EIGTGFPFDPHYVEVQG

SEQ ID NO: 877 - protein, 17 aa, Synthetic construct
EIGTGFPFDPHYVEVSG

SEQ ID NO: 878 - protein, 17 aa, Synthetic construct
EIGTGFPFDPHYVEVRG

SEQ ID NO: 879 - protein, 17 aa, Synthetic construct
EIGTGFPFDPHYVEVTG

SEQ ID NO: 880 - protein, 17 aa, Synthetic construct
EIGTGFPFDPHYVEVWG

SEQ ID NO: 881 - protein, 17 aa, Synthetic construct
EIGTGFPFDPHYVEVVG

SEQ ID NO: 882 - protein, 17 aa, Synthetic construct
EIGTGFPFDPHYVEVYG

SEQ ID NO: 883 - protein, 17 aa, Synthetic construct
EIGTGFPFDPHYVEVLA

SEQ ID NO: 884 - protein, 17 aa, Synthetic construct
EIGTGFPFDPHYVEVLC

SEQ ID NO: 885 - protein, 17 aa, Synthetic construct
EIGTGFPFDPHYVEVLE

SEQ ID NO: 886 - protein, 17 aa, Synthetic construct
EIGTGFPFDPHYVEVLD

SEQ ID NO: 887 - protein, 17 aa, Synthetic construct
EIGTGFPFDPHYVEVLF

SEQ ID NO: 888 - protein, 17 aa, Synthetic construct
EIGTGFPFDPHYVEVLI

SEQ ID NO: 889 - protein, 17 aa, Synthetic construct
EIGTGFPFDPHYVEVLH

SEQ ID NO: 890 - protein, 17 aa, Synthetic construct
EIGTGFPFDPHYVEVLK

SEQ ID NO: 891 - protein, 17 aa, Synthetic construct
EIGTGFPFDPHYVEVLM

SEQ ID NO: 892 - protein, 17 aa, Synthetic construct
EIGTGFPFDPHYVEVLL

SEQ ID NO: 893 - protein, 17 aa, Synthetic construct
EIGTGFPFDPHYVEVLN

SEQ ID NO: 894 - protein, 17 aa, Synthetic construct
EIGTGFPFDPHYVEVLP

SEQ ID NO: 895 - protein, 17 aa, Synthetic construct
EIGTGFPFDPHYVEVLQ

SEQ ID NO: 896 - protein, 17 aa, Synthetic construct
EIGTGFPFDPHYVEVLS

SEQ ID NO: 897 - protein, 17 aa, Synthetic construct
EIGTGFPFDPHYVEVLR

SEQ ID NO: 898 - protein, 17 aa, Synthetic construct
EIGTGFPFDPHYVEVLT

SEQ ID NO: 899 - protein, 17 aa, Synthetic construct
EIGTGFPFDPHYVEVLW

SEQ ID NO: 900 - protein, 17 aa, Synthetic construct
EIGTGFPFDPHYVEVLV

SEQ ID NO: 901 - protein, 17 aa, Synthetic construct
EIGTGFPFDPHYVEVLY

SEQ ID NO: 902 - protein, 17 aa, Synthetic construct
EIGTGWPWDPHYVEVLG

SEQ ID NO: 903 - protein, 17 aa, Synthetic construct
EIGTGWPYDPHYVEVLG

SEQ ID NO: 904 - protein, 17 aa, Synthetic construct
EIGTGWPFDPHFVEVLG

SEQ ID NO: 905 - protein, 17 aa, Synthetic construct
EIGTGWPFDPHWVEVLG

SEQ ID NO: 906 - protein, 17 aa, Synthetic construct
EIGTGWPFDPHYLEVLG

SEQ ID NO: 907 - protein, 17 aa, Synthetic construct
EIGTGWPFDPHYIEVLG

SEQ ID NO: 908 - protein, 17 aa, Synthetic construct
EIGTGWPFDPHYMEVLG

SEQ ID NO: 909 - protein, 17 aa, Synthetic construct
EIGTGWPFDPHYVELLG

SEQ ID NO: 910 - protein, 17 aa, Synthetic construct
EIGTGWPFDPHYVEILG

SEQ ID NO: 911 - protein, 17 aa, Synthetic construct
EIGTGYPWDPHYVEVLG

SEQ ID NO: 912 - protein, 17 aa, Synthetic construct
EIGTGYPYDPHYVEVLG

SEQ ID NO: 913 - protein, 17 aa, Synthetic construct
EIGTGYPFDPHFVEVLG

SEQ ID NO: 914 - protein, 17 aa, Synthetic construct
EIGTGYPFDPHWVEVLG

SEQ ID NO: 915 - protein, 17 aa, Synthetic construct
EIGTGYPFDPHYLEVLG

SEQ ID NO: 916 - protein, 17 aa, Synthetic construct
EIGTGYPFDPHYIEVLG

SEQ ID NO: 917 - protein, 17 aa, Synthetic construct
EIGTGYPFDPHYMEVLG

SEQ ID NO: 918 - protein, 17 aa, Synthetic construct
EIGTGYPFDPHYVELLG

SEQ ID NO: 919 - protein, 17 aa, Synthetic construct
EIGTGYPFDPHYVEILG

SEQ ID NO: 920 - protein, 17 aa, Synthetic construct
EIGTGMPWDPHYVEVLG

SEQ ID NO: 921 - protein, 17 aa, Synthetic construct
EIGTGMPYDPHYVEVLG

SEQ ID NO: 922 - protein, 17 aa, Synthetic construct
EIGTGMPFDPHFVEVLG

SEQ ID NO: 923 - protein, 17 aa, Synthetic construct
EIGTGMPFDPHWVEVLG

SEQ ID NO: 924 - protein, 17 aa, Synthetic construct
EIGTGMPFDPHYLEVLG

SEQ ID NO: 925 - protein, 17 aa, Synthetic construct
EIGTGMPFDPHYIEVLG

SEQ ID NO: 926 - protein, 17 aa, Synthetic construct
EIGTGMPFDPHYMEVLG

SEQ ID NO: 927 - protein, 17 aa, Synthetic construct
EIGTGMPFDPHYVELLG

SEQ ID NO: 928 - protein, 17 aa, Synthetic construct
EIGTGMPFDPHYVEILG

SEQ ID NO: 929 - protein, 17 aa, Synthetic construct
EIGTGFPWDPHFVEVLG

SEQ ID NO: 930 - protein, 17 aa, Synthetic construct
EIGTGFPWDPHWVEVLG

SEQ ID NO: 931 - protein, 17 aa, Synthetic construct
EIGTGFPWDPHYLEVLG

SEQ ID NO: 932 - protein, 17 aa, Synthetic construct
EIGTGFPWDPHYIEVLG

SEQ ID NO: 933 - protein, 17 aa, Synthetic construct
EIGTGFPWDPHYMEVLG

SEQ ID NO: 934 - protein, 17 aa, Synthetic construct
EIGTGFPWDPHYVELLG

SEQ ID NO: 935 - protein, 17 aa, Synthetic construct
EIGTGFPWDPHYVEILG

SEQ ID NO: 936 - protein, 17 aa, Synthetic construct
EIGTGFPYDPHFVEVLG

SEQ ID NO: 937 - protein, 17 aa, Synthetic construct
EIGTGFPYDPHWVEVLG

SEQ ID NO: 938 - protein, 17 aa, Synthetic construct
EIGTGFPYDPHYLEVLG

SEQ ID NO: 939 - protein, 17 aa, Synthetic construct
EIGTGFPYDPHYIEVLG

SEQ ID NO: 940 - protein, 17 aa, Synthetic construct
EIGTGFPYDPHYMEVLG

SEQ ID NO: 941 - protein, 17 aa, Synthetic construct
EIGTGFPYDPHYVELLG

SEQ ID NO: 942 - protein, 17 aa, Synthetic construct
EIGTGFPYDPHYVEILG

SEQ ID NO: 943 - protein, 17 aa, Synthetic construct
EIGTGFPFDPHFLEVLG

SEQ ID NO: 944 - protein, 17 aa, Synthetic construct
EIGTGFPFDPHFIEVLG

SEQ ID NO: 945 - protein, 17 aa, Synthetic construct
EIGTGFPFDPHFMEVLG

SEQ ID NO: 946 - protein, 17 aa, Synthetic construct
EIGTGFPFDPHFVELLG

SEQ ID NO: 947 - protein, 17 aa, Synthetic construct
EIGTGFPFDPHFVEILG

SEQ ID NO: 948 - protein, 17 aa, Synthetic construct
EIGTGFPFDPHWLEVLG

SEQ ID NO: 949 - protein, 17 aa, Synthetic construct
EIGTGFPFDPHWIEVLG

SEQ ID NO: 950 - protein, 17 aa, Synthetic construct
EIGTGFPFDPHWMEVLG

SEQ ID NO: 951 - protein, 17 aa, Synthetic construct
EIGTGFPFDPHWVELLG

SEQ ID NO: 952 - protein, 17 aa, Synthetic construct
EIGTGFPFDPHWVEILG

SEQ ID NO: 953 - protein, 17 aa, Synthetic construct
EIGTGFPFDPHYLELLG

SEQ ID NO: 954 - protein, 17 aa, Synthetic construct
EIGTGFPFDPHYLEILG

SEQ ID NO: 955 - protein, 17 aa, Synthetic construct
EIGTGFPFDPHYIELLG

SEQ ID NO: 956 - protein, 17 aa, Synthetic construct
EIGTGFPFDPHYIEILG

SEQ ID NO: 957 - protein, 17 aa, Synthetic construct
EIGTGFPFDPHYMELLG

SEQ ID NO: 958 - protein, 17 aa, Synthetic construct
EIGTGFPFDPHYMEILG

SEQ ID NO: 959 - protein, 17 aa, Synthetic construct
EDDTEFPFDPHYVEVLG

SEQ ID NO: 960 - protein, 17 aa, Synthetic construct
EDDTRFPFDPHYVEVLG

SEQ ID NO: 961 - protein, 17 aa, Synthetic construct
EDDTGFQFDPHYVEVLG

SEQ ID NO: 962 - protein, 17 aa, Synthetic construct
EDDTGFHFDPHYVEVLG

SEQ ID NO: 963 - protein, 17 aa, Synthetic construct
EDDTGFPFDEHYVEVLG

SEQ ID NO: 964 - protein, 17 aa, Synthetic construct
EDDTGFPFDAHYVEVLG

SEQ ID NO: 965 - protein, 17 aa, Synthetic construct
EDDTGFPFDPKYVEVLG

SEQ ID NO: 966 - protein, 17 aa, Synthetic construct
EDGTEFQFDPHYVEVLG

SEQ ID NO: 967 - protein, 17 aa, Synthetic construct
EDGTEFHFDPHYVEVLG

SEQ ID NO: 968 - protein, 17 aa, Synthetic construct
EDGTEFPFDEHYVEVLG

SEQ ID NO: 969 - protein, 17 aa, Synthetic construct
EDGTEFPFDAHYVEVLG

SEQ ID NO: 970 - protein, 17 aa, Synthetic construct
EDGTEFPFDPKYVEVLG

SEQ ID NO: 971 - protein, 17 aa, Synthetic construct
EDGTRFQFDPHYVEVLG

SEQ ID NO: 972 - protein, 17 aa, Synthetic construct
EDGTRFHFDPHYVEVLG

SEQ ID NO: 973 - protein, 17 aa, Synthetic construct
EDGTRFPFDAHYVEVLG

SEQ ID NO: 974 - protein, 17 aa, Synthetic construct
EDGTRFPFDPKYVEVLG

SEQ ID NO: 975 - protein, 17 aa, Synthetic construct
EDGTGFHFDPHYVEVLG

SEQ ID NO: 976 - protein, 17 aa, Synthetic construct
EDGTGFQFDEHYVEVLG

SEQ ID NO: 977 - protein, 17 aa, Synthetic construct
EDGTGFQFDAHYVEVLG

SEQ ID NO: 978 - protein, 17 aa, Synthetic construct
EDGTGFQFDPKYVEVLG

SEQ ID NO: 979 - protein, 17 aa, Synthetic construct
EIDTEFQFDPHYVEVLG

SEQ ID NO: 980 - protein, 17 aa, Synthetic construct
EIDTEFHFDPHYVEVLG

SEQ ID NO: 981 - protein, 17 aa, Synthetic construct
EIDTEFPFDEHYVEVLG

SEQ ID NO: 982 - protein, 17 aa, Synthetic construct
EIDTEFPFDAHYVEVLG

SEQ ID NO: 983 - protein, 17 aa, Synthetic construct
EIDTEFPFDPKYVEVLG

SEQ ID NO: 984 - protein, 17 aa, Synthetic construct
EIDTRFQFDPHYVEVLG

SEQ ID NO: 985 - protein, 17 aa, Synthetic construct
EIDTRFHFDPHYVEVLG

SEQ ID NO: 986 - protein, 17 aa, Synthetic construct
EIDTRFPFDEHYVEVLG

SEQ ID NO: 987 - protein, 17 aa, Synthetic construct
EIDTRFPFDAHYVEVLG

SEQ ID NO: 988 - protein, 17 aa, Synthetic construct
EIDTRFPFDPKYVEVLG

SEQ ID NO: 989 - protein, 17 aa, Synthetic construct
EIDTGFHFDPHYVEVLG

SEQ ID NO: 990 - protein, 17 aa, Synthetic construct
EIDTGFQFDAHYVEVLG

SEQ ID NO: 991 - protein, 17 aa, Synthetic construct
EIDTGFQFDPKYVEVLG

SEQ ID NO: 992 - protein, 17 aa, Synthetic construct
EFNDGFPFDPHYVEVLG

SEQ ID NO: 993 - protein, 17 aa, Synthetic construct
EFNTQFPFDPHYVEVLG

SEQ ID NO: 994 - protein, 17 aa, Synthetic construct
EFNTGFNFDPHYVEVLG

SEQ ID NO: 995 - protein, 17 aa, Synthetic construct
EFNTGFPFDFHYVEVLG

SEQ ID NO: 996 - protein, 17 aa, Synthetic construct
EFNTGFPFDNHYVEVLG

SEQ ID NO: 997 - protein, 17 aa, Synthetic construct
EFNTGFPFDPNYVEVLG

SEQ ID NO: 998 - protein, 17 aa, Synthetic construct
EFGDQFPFDPHYVEVLG

SEQ ID NO: 999 - protein, 17 aa, Synthetic construct
EFGDGFNFDPHYVEVLG

SEQ ID NO: 1000 - protein, 17 aa, Synthetic construct
EFGDGFPFDFHYVEVLG

SEQ ID NO: 1001 - protein, 17 aa, Synthetic construct
EFGDGFPFDNHYVEVLG

SEQ ID NO: 1002 - protein, 17 aa, Synthetic construct
EFGDGFPFDPNYVEVLG

SEQ ID NO: 1003 - protein, 17 aa, Synthetic construct
EFGTQFNFDPHYVEVLG

SEQ ID NO: 1004 - protein, 17 aa, Synthetic construct
EFGTQFPFDFHYVEVLG

SEQ ID NO: 1005 - protein, 17 aa, Synthetic construct
EFGTQFPFDNHYVEVLG

SEQ ID NO: 1006 - protein, 17 aa, Synthetic construct
EFGTQFPFDPNYVEVLG

SEQ ID NO: 1007 - protein, 17 aa, Synthetic construct
EFGTGFNFDFHYVEVLG

SEQ ID NO: 1008 - protein, 17 aa, Synthetic construct
EFGTGFNFDNHYVEVLG

SEQ ID NO: 1009 - protein, 17 aa, Synthetic construct
EFGTGFNFDPNYVEVLG

SEQ ID NO: 1010 - protein, 17 aa, Synthetic construct
EFGTGFPFDFNYVEVLG

SEQ ID NO: 1011 - protein, 17 aa, Synthetic construct
EINDQFPFDPHYVEVLG

SEQ ID NO: 1012 - protein, 17 aa, Synthetic construct
EINDGFNFDPHYVEVLG

SEQ ID NO: 1013 - protein, 17 aa, Synthetic construct
EINDGFPFDFHYVEVLG

SEQ ID NO: 1014 - protein, 17 aa, Synthetic construct
EINDGFPFDNHYVEVLG

SEQ ID NO: 1015 - protein, 17 aa, Synthetic construct
EINDGFPFDPNYVEVLG

SEQ ID NO: 1016 - protein, 17 aa, Synthetic construct
EINTQFNFDPHYVEVLG

SEQ ID NO: 1017 - protein, 17 aa, Synthetic construct
EINTQFPFDFHYVEVLG

SEQ ID NO: 1018 - protein, 17 aa, Synthetic construct
EINTQFPFDNHYVEVLG

SEQ ID NO: 1019 - protein, 17 aa, Synthetic construct
EINTQFPFDPNYVEVLG

SEQ ID NO: 1020 - protein, 17 aa, Synthetic construct
EINTGFNFDFHYVEVLG

SEQ ID NO: 1021 - protein, 17 aa, Synthetic construct
EINTGFNFDNHYVEVLG

SEQ ID NO: 1022 - protein, 17 aa, Synthetic construct
EINTGFNFDPNYVEVLG

SEQ ID NO: 1023 - protein, 17 aa, Synthetic construct
EINTGFPFDFNYVEVLG

SEQ ID NO: 1024 - protein, 17 aa, Synthetic construct
EIGDQFNFDPHYVEVLG

SEQ ID NO: 1025 - protein, 17 aa, Synthetic construct
EIGDQFPFDFHYVEVLG

SEQ ID NO: 1026 - protein, 17 aa, Synthetic construct
EIGDQFPFDNHYVEVLG

SEQ ID NO: 1027 - protein, 17 aa, Synthetic construct
EIGDQFPFDPNYVEVLG

SEQ ID NO: 1028 - protein, 17 aa, Synthetic construct
EIGDGFNFDFHYVEVLG

SEQ ID NO: 1029 - protein, 17 aa, Synthetic construct
EIGDGFNFDNHYVEVLG

SEQ ID NO: 1030 - protein, 17 aa, Synthetic construct
EIGDGFNFDPNYVEVLG

SEQ ID NO: 1031 - protein, 17 aa, Synthetic construct
EIGDGFPFDFNYVEVLG

SEQ ID NO: 1032 - protein, 17 aa, Synthetic construct
EIGTQFNFDFHYVEVLG

SEQ ID NO: 1033 - protein, 17 aa, Synthetic construct
EIGTQFNFDNHYVEVLG

SEQ ID NO: 1034 - protein, 17 aa, Synthetic construct
EIGTQFNFDPNYVEVLG

SEQ ID NO: 1035 - protein, 17 aa, Synthetic construct
EIGTQFPFDFNYVEVLG

SEQ ID NO: 1036 - protein, 17 aa, Synthetic construct
EIGTGFNFDFNYVEVLG

SEQ ID NO: 1037 - protein, 17 aa, Synthetic construct
ERKTEFPFDPHYVEVLG

SEQ ID NO: 1038 - protein, 17 aa, Synthetic construct
ERKTRFPFDPHYVEVLG

SEQ ID NO: 1039 - protein, 17 aa, Synthetic construct
ERKTGFQFDPHYVEVLG

SEQ ID NO: 1040 - protein, 17 aa, Synthetic construct
ERKTGFHFDPHYVEVLG

SEQ ID NO: 1041 - protein, 17 aa, Synthetic construct
ERKTGFPFDEHYVEVLG

SEQ ID NO: 1042 - protein, 17 aa, Synthetic construct
ERKTGFPFDAHYVEVLG

SEQ ID NO: 1043 - protein, 17 aa, Synthetic construct
ERKTGFPFDPKYVEVLG

SEQ ID NO: 1044 - protein, 17 aa, Synthetic construct
ERGTEFQFDPHYVEVLG

SEQ ID NO: 1045 - protein, 17 aa, Synthetic construct
ERGTEFHFDPHYVEVLG

SEQ ID NO: 1046 - protein, 17 aa, Synthetic construct
ERGTEFPFDEHYVEVLG

SEQ ID NO: 1047 - protein, 17 aa, Synthetic construct
ERGTEFPFDAHYVEVLG

SEQ ID NO: 1048 - protein, 17 aa, Synthetic construct
ERGTEFPFDPKYVEVLG

SEQ ID NO: 1049 - protein, 17 aa, Synthetic construct
ERGTRFQFDPHYVEVLG

SEQ ID NO: 1050 - protein, 17 aa, Synthetic construct
ERGTRFHFDPHYVEVLG

SEQ ID NO: 1051 - protein, 17 aa, Synthetic construct
ERGTRFPFDEHYVEVLG

SEQ ID NO: 1052 - protein, 17 aa, Synthetic construct
ERGTRFPFDAHYVEVLG

SEQ ID NO: 1053 - protein, 17 aa, Synthetic construct
ERGTRFPFDPKYVEVLG

SEQ ID NO: 1054 - protein, 17 aa, Synthetic construct
ERGTGFQFDEHYVEVLG

SEQ ID NO: 1055 - protein, 17 aa, Synthetic construct
ERGTGFQFDAHYVEVLG

SEQ ID NO: 1056 - protein, 17 aa, Synthetic construct
ERGTGFQFDPKYVEVLG

SEQ ID NO: 1057 - protein, 17 aa, Synthetic construct
EIKTEFQFDPHYVEVLG

SEQ ID NO: 1058 - protein, 17 aa, Synthetic construct
EIKTEFHFDPHYVEVLG

SEQ ID NO: 1059 - protein, 17 aa, Synthetic construct
EIKTEFPFDEHYVEVLG

SEQ ID NO: 1060 - protein, 17 aa, Synthetic construct
EIKTEFPFDAHYVEVLG

SEQ ID NO: 1061 - protein, 17 aa, Synthetic construct
EIKTEFPFDPKYVEVLG

SEQ ID NO: 1062 - protein, 17 aa, Synthetic construct
EIKTRFQFDPHYVEVLG

SEQ ID NO: 1063 - protein, 17 aa, Synthetic construct
EIKTRFHFDPHYVEVLG

SEQ ID NO: 1064 - protein, 17 aa, Synthetic construct
EIKTRFPFDEHYVEVLG

SEQ ID NO: 1065 - protein, 17 aa, Synthetic construct
EIKTRFPFDAHYVEVLG

SEQ ID NO: 1066 - protein, 17 aa, Synthetic construct
EIKTRFPFDPKYVEVLG

SEQ ID NO: 1067 - protein, 17 aa, Synthetic construct
EIKTGFQFDEHYVEVLG

SEQ ID NO: 1068 - protein, 17 aa, Synthetic construct
EIKTGFQFDAHYVEVLG

SEQ ID NO: 1069 - protein, 17 aa, Synthetic construct
EIKTGFQFDPKYVEVLG

SEQ ID NO: 1070 - protein, 17 aa, Synthetic construct
EIGTEFQFDEHYVEVLG

SEQ ID NO: 1071 - protein, 17 aa, Synthetic construct
EIGTEFQFDAHYVEVLG

SEQ ID NO: 1072 - protein, 17 aa, Synthetic construct
EIGTEFQFDPKYVEVLG

SEQ ID NO: 1073 - protein, 17 aa, Synthetic construct
EIGTRFQFDEHYVEVLG

SEQ ID NO: 1074 - protein, 17 aa, Synthetic construct
EIGTRFQFDAHYVEVLG

SEQ ID NO: 1075 - protein, 17 aa, Synthetic construct
EIGTRFQFDPKYVEVLG

SEQ ID NO: 1076 - protein, 17 aa, Synthetic construct
EIGTGFQFDEKYVEVLG

SEQ ID NO: 1077 - protein, 17 aa, Synthetic construct
EIGTGFQFDAKYVEVLG

SEQ ID NO: 1078 - protein, 17 aa, Synthetic construct
EIGTGWPYDPHFVEVLG

SEQ ID NO: 1079 - protein, 17 aa, Synthetic construct
EIGTGYPYDPHYLEVLG

SEQ ID NO: 1080 - protein, 17 aa, Synthetic construct
EIGTGFPYDPHWLEVLG

SEQ ID NO: 1081 - protein, 17 aa, Synthetic construct
EIGTGFPYDPHYIEILG

SEQ ID NO: 1082 - protein, 17 aa, Synthetic construct
EIGTGFPFDPHWIEILG

SEQ ID NO: 1083 - protein, 17 aa, Synthetic construct
EIGTGWPYDPHWLEVLG

SEQ ID NO: 1084 - protein, 17 aa, Synthetic construct
EIGTGWPYDPHYIEILG

SEQ ID NO: 1085 - protein, 17 aa, Synthetic construct
EIGTGYPYDPHFLEVLG

SEQ ID NO: 1086 - protein, 17 aa, Synthetic construct
EIGTGWPYDPHFLEILG

SEQ ID NO: 1087 - protein, 17 aa, Synthetic construct
ERKTRYPYDPHWLEVLG

SEQ ID NO: 1088 - protein, 17 aa, Synthetic construct
EINTQYNYDPHWLEVLG

SEQ ID NO: 1089 - protein, 17 aa, Synthetic construct
EIGDQYPYDPNWLEVLG

SEQ ID NO: 1090 - protein, 17 aa, Synthetic construct
EIGTRYQYDAHWLEVLG

SEQ ID NO: 1091 - protein, 17 aa, Synthetic construct
EIDTEYPYDEHWLEVLG

SEQ ID NO: 1092 - protein, 17 aa, Synthetic construct
ERKTRWPYDPHYIEILG

SEQ ID NO: 1093 - protein, 17 aa, Synthetic construct
EINTQWNYDPHYIEILG

SEQ ID NO: 1094 - protein, 17 aa, Synthetic construct
EIGDQWPYDPNYIEILG

SEQ ID NO: 1095 - protein, 17 aa, Synthetic construct
EIGTRWQYDAHYIEILG

SEQ ID NO: 1096 - protein, 17 aa, Synthetic construct
EIDTEWPYDEHYIEILG

SEQ ID NO: 1097 - protein, 17 aa, Synthetic construct
ERKTRWPYDPHFLEILG

SEQ ID NO: 1098 - protein, 17 aa, Synthetic construct
EINTQWNYDPHFLEILG

SEQ ID NO: 1099 - protein, 17 aa, Synthetic construct
EIGDQWPYDPNFLEILG

SEQ ID NO: 1100 - protein, 17 aa, Synthetic construct
EIGTRWQYDAHFLEILG

SEQ ID NO: 1101 - protein, 17 aa, Synthetic construct
EIDTEWPYDEHFLEILG

SEQ ID NO: 1102 - protein, 17 aa, Synthetic construct
EIGTQWNYDFHFLEILG

SEQ ID NO: 1103 - protein, 17 aa, Synthetic construct
EIGTGFPFRPHYVKVLG

SEQ ID NO: 1104 - protein, 17 aa, Synthetic construct
EIGTGFPFRPHYVRVLG

SEQ ID NO: 1105 - protein, 17 aa, Synthetic construct
EIGTGFPFRPHYVEVRG

SEQ ID NO: 1106 - protein, 17 aa, Synthetic construct
EIGTGFPFRPHYVEVLR

SEQ ID NO: 1107 - protein, 17 aa, Synthetic construct
EIGTGFPFDPHYVKVRG

SEQ ID NO: 1108 - protein, 17 aa, Synthetic construct
EIGTGFPFDPHYVKVLR

SEQ ID NO: 1109 - protein, 17 aa, Synthetic construct
EIGTGFPFDPHYVRVRG

SEQ ID NO: 1110 - protein, 17 aa, Synthetic construct
EIGTGFPFDPHYVRVLR

SEQ ID NO: 1111 - protein, 17 aa, Synthetic construct
EIGTGFPFRPHYVKVRG

SEQ ID NO: 1112 - protein, 17 aa, Synthetic construct
EIGTGFPFRPHYVKVLR

SEQ ID NO: 1113 - protein, 17 aa, Synthetic construct
EIGTGFPFRPHYVRVRG

SEQ ID NO: 1114 - protein, 17 aa, Synthetic construct
EIGTGFPFRPHYVRVLR

SEQ ID NO: 1115 - protein, 17 aa, Synthetic construct
EIGTGFPFRPHYVKVRR

SEQ ID NO: 1116 - protein, 17 aa, Synthetic construct
ERKTRFPFRPHYVKVRG

SEQ ID NO: 1117 - protein, 17 aa, Synthetic construct
EINTQFNFRPHYVKVRG

SEQ ID NO: 1118 - protein, 17 aa, Synthetic construct
EIGDQFPFRPNYVKVRG

SEQ ID NO: 1119 - protein, 17 aa, Synthetic construct
EIGTRFQFRAHYVKVRG

SEQ ID NO: 1120 - protein, 17 aa, Synthetic construct
EIDTEFPFREHYVKVRG

SEQ ID NO: 1121 - protein, 17 aa, Synthetic construct
ERKTRFPFRPHYVKVLR

SEQ ID NO: 1122 - protein, 17 aa, Synthetic construct
EINTQFNFRPHYVKVLR

SEQ ID NO: 1123 - protein, 17 aa, Synthetic construct
EIGDQFPFRPNYVKVLR

SEQ ID NO: 1124 - protein, 17 aa, Synthetic construct
EIGTRFQFRAHYVKVLR

SEQ ID NO: 1125 - protein, 17 aa, Synthetic construct
EIDTEFPFREHYVKVLR

SEQ ID NO: 1126 - protein, 17 aa, Synthetic construct
ERKTRFPFRPHYVKVRR

SEQ ID NO: 1127 - protein, 17 aa, Synthetic construct
EINTQFNFRPHYVKVRR

SEQ ID NO: 1128 - protein, 17 aa, Synthetic construct
EIGDQFPFRPNYVKVRR

SEQ ID NO: 1129 - protein, 17 aa, Synthetic construct
EIGTRFQFRAHYVKVRR

SEQ ID NO: 1130 - protein, 17 aa, Synthetic construct
EIDTEFPFREHYVKVRR

SEQ ID NO: 1131 - protein, 17 aa, Synthetic construct
EIGTQFNFRFHYVKVRR

SEQ ID NO: 1132 - protein, 17 aa, Synthetic construct
EINDQFNFRPHYVKVRR

SEQ ID NO: 1133 - protein, 17 aa, Synthetic construct
EINTQFNFRPNYVKVRR

SEQ ID NO: 1134 - protein, 17 aa, Synthetic construct
EINDQFNFRPNYVKVRR

SEQ ID NO: 1135 - protein, 17 aa, Synthetic construct
ARNDQFNFRANYVKVRR

SEQ ID NO: 1136 - protein, 17 aa, Synthetic construct
ARNDQFNFRENYVKVRR

SEQ ID NO: 1137 - protein, 17 aa, Synthetic construct
ARNDQFNFRSNYVKVRR

SEQ ID NO: 1138 - protein, 17 aa, Synthetic construct
DRNDQFNFRANYVKVRR

SEQ ID NO: 1139 - protein, 17 aa, Synthetic construct
DRNDQFNFRENYVKVRR

SEQ ID NO: 1140 - protein, 17 aa, Synthetic construct
DRNDQFNFRSNYVKVRR

SEQ ID NO: 1141 - protein, 17 aa, Synthetic construct
KRNDQFNFRANYVKVRR

SEQ ID NO: 1142 - protein, 17 aa, Synthetic construct
KRNDQFNFRENYVKVRR

SEQ ID NO: 1143 - protein, 17 aa, Synthetic construct
KRNDQFNFRSNYVKVRR

SEQ ID NO: 1144 - protein, 17 aa, Synthetic construct
AFNDQFNFRANYVKVRR

SEQ ID NO: 1145 - protein, 17 aa, Synthetic construct
DFNDQFNFRANYVKVRR

SEQ ID NO: 1146 - protein, 17 aa, Synthetic construct
KFNDQFNFRANYVKVRR

SEQ ID NO: 1147 - protein, 17 aa, Synthetic construct
ADNDQFNFRANYVKVRR

SEQ ID NO: 1148 - protein, 17 aa, Synthetic construct
DDNDQFNFRANYVKVRR

SEQ ID NO: 1149 - protein, 17 aa, Synthetic construct
KDNDQFNFRANYVKVRR

SEQ ID NO: 1150 - protein, 17 aa, Synthetic construct
EIGTGWPYRPHFLKIRR

SEQ ID NO: 1151 - protein, 17 aa, Synthetic construct
ARGTGWPYRAHFLKIRR

SEQ ID NO: 1152 - protein, 17 aa, Synthetic construct
ARGTGWPYREHFLKIRR

SEQ ID NO: 1153 - protein, 17 aa, Synthetic construct
ARGTGWPYRSHFLKIRR

SEQ ID NO: 1154 - protein, 17 aa, Synthetic construct
DRGTGWPYRAHFLKIRR

SEQ ID NO: 1155 - protein, 17 aa, Synthetic construct
DRGTGWPYREHFLKIRR

SEQ ID NO: 1156 - protein, 17 aa, Synthetic construct
DRGTGWPYRSHFLKIRR

SEQ ID NO: 1157 - protein, 17 aa, Synthetic construct
KRGTGWPYRAHFLKIRR

SEQ ID NO: 1158 - protein, 17 aa, Synthetic construct
KRGTGWPYREHFLKIRR

SEQ ID NO: 1159 - protein, 17 aa, Synthetic construct
KRGTGWPYRSHFLKIRR

SEQ ID NO: 1160 - protein, 17 aa, Synthetic construct
AFGTGWPYRAHFLKIRR

SEQ ID NO: 1161 - protein, 17 aa, Synthetic construct
DFGTGWPYRAHFLKIRR

SEQ ID NO: 1162 - protein, 17 aa, Synthetic construct
KFGTGWPYRAHFLKIRR

SEQ ID NO: 1163 - protein, 17 aa, Synthetic construct
ADGTGWPYRAHFLKIRR

SEQ ID NO: 1164 - protein, 17 aa, Synthetic construct
DDGTGWPYRAHFLKIRR

SEQ ID NO: 1165 - protein, 17 aa, Synthetic construct
KDGTGWPYRAHFLKIRR

SEQ ID NO: 1166 - protein, 17 aa, Synthetic construct
EIGDGWPYRPHFLKIRR

SEQ ID NO: 1167 - protein, 17 aa, Synthetic construct
EIGTGWPYRPNFLKIRR

SEQ ID NO: 1168 - protein, 17 aa, Synthetic construct
EIGDGWPYRPNFLKIRR

SEQ ID NO: 1169 - protein, 17 aa, Synthetic construct
EINTQWNYRPHFLKIRR

SEQ ID NO: 1170 - protein, 17 aa, Synthetic construct
EINDQWNYRPHFLKIRR

SEQ ID NO: 1171 - protein, 17 aa, Synthetic construct
EINDQWNYRPNFLKIRR

SEQ ID NO: 1172 - protein, 17 aa, Synthetic construct
EIGDQWPYRPNFLKIRR

SEQ ID NO: 1173 - protein, 17 aa, Synthetic construct
ARNDQWNYRANFLKIRR

SEQ ID NO: 1174 - protein, 17 aa, Synthetic construct
ARNDQWNYRENFLKIRR

SEQ ID NO: 1175 - protein, 17 aa, Synthetic construct
ARNDQWNYRSNFLKIRR

SEQ ID NO: 1176 - protein, 17 aa, Synthetic construct
DRNDQWNYRANFLKIRR

SEQ ID NO: 1177 - protein, 17 aa, Synthetic construct
DRNDQWNYRENFLKIRR

SEQ ID NO: 1178 - protein, 17 aa, Synthetic construct
DRNDQWNYRSNFLKIRR

SEQ ID NO: 1179 - protein, 17 aa, Synthetic construct
KRNDQWNYRANFLKIRR

SEQ ID NO: 1180 - protein, 17 aa, Synthetic construct
KRNDQWNYRENFLKIRR

SEQ ID NO: 1181 - protein, 17 aa, Synthetic construct
KRNDQWNYRSNFLKIRR

SEQ ID NO: 1182 - protein, 17 aa, Synthetic construct
AFNDQWNYRANFLKIRR

SEQ ID NO: 1183 - protein, 17 aa, Synthetic construct
DFNDQWNYRANFLKIRR

SEQ ID NO: 1184 - protein, 17 aa, Synthetic construct
KFNDQWNYRANFLKIRR

SEQ ID NO: 1185 - protein, 17 aa, Synthetic construct
ADNDQWNYRANFLKIRR

SEQ ID NO: 1186 - protein, 17 aa, Synthetic construct
DDNDQWNYRANFLKIRR

SEQ ID NO: 1187 - protein, 17 aa, Synthetic construct
KDNDQWNYRANFLKIRR

SEQ ID NO: 1188 - protein, 277 aa, Synthetic construct
MFHYVDVGPRDGTPVLFLHGNPTSSYVWRNIIPHVAPTHRCIAPDLIGMGKSDKPDLGYFFDDHVRFMDAFIEALGLEEVVLVIHDWGSALGFHWAKRNPERVKGIAFMEFIRPIPTWDEWPEFARETFQAFRTTDVGRKLIIDQNVFIEGTLPMGVVRPLTEVEMDHYREPFLNPVDREPLWRFPNELPIAGEPANIVALVEEYMDWLHQSPVPKLLFWGTPGVLIPPAEAARLAKSLPNCKAVDIGPGLNLLQEDNPDLIGSEIARWLSTLEISG

SEQ ID NO: 1189 - protein, 277 aa, Synthetic construct
MVHYVDVGPRDGTPVLFLHGNPTSSYVWRNIIPHVAPTHRCIAPDLIGMGKSDKPDLGYFFDDHVRFMDAFIEALGLEEVVLVIHDWGSALGFHWAKRNPERVKGIAFMEFIRPIPTWDEWPEFARETFQAFRTTDVGRKLIIDQNVFIEGTLPMGVVRPLTEVEMDHYREPFLNPVDREPLWRFPNELPIAGEPANIVALVEEYMDWLHQSPVPKLLFWGTPGVLIPPAEAARLAKSLPNCKAVDIGPGLNLLQEDNPDLIGSEIARWLSTLEISG

SEQ ID NO: 1190 - protein, 277 aa, Synthetic construct
MLHYVDVGPRDGTPVLFLHGNPTSSYVWRNIIPHVAPTHRCIAPDLIGMGKSDKPDLGYFFDDHVRFMDAFIEALGLEEVVLVIHDWGSALGFHWAKRNPERVKGIAFMEFIRPIPTWDEWPEFARETFQAFRTTDVGRKLIIDQNVFIEGTLPMGVVRPLTEVEMDHYREPFLNPVDREPLWRFPNELPIAGEPANIVALVEEYMDWLHQSPVPKLLFWGTPGVLIPPAEAARLAKSLPNCKAVDIGPGLNLLQEDNPDLIGSEIARWLSTLEISG

SEQ ID NO: 1191 - protein, 277 aa, Synthetic construct
MRHYVDVGPRDGTPVLFLHGNPTSSYVWRNIIPHVAPTHRCIAPDLIGMGKSDKPDLGYFFDDHVRFMDAFIEALGLEEVVLVIHDWGSALGFHWAKRNPERVKGIAFMEFIRPIPTWDEWPEFARETFQAFRTTDVGRKLIIDQNVFIEGTLPMGVVRPLTEVEMDHYREPFLNPVDREPLWRFPNELPIAGEPANIVALVEEYMDWLHQSPVPKLLFWGTPGVLIPPAEAARLAKSLPNCKAVDIGPGLNLLQEDNPDLIGSEIARWLSTLEISG

SEQ ID NO: 1192 - protein, 277 aa, Synthetic construct
MGHYVDVGPRDGTPVLFLHGNPTSSYVWRNIIPHVAPTHRCIAPDLIGMGKSDKPDLGYFFDDHVRFMDAFIEALGLEEVVLVIHDWGSALGFHWAKRNPERVKGIAFMEFIRPIPTWDEWPEFARETFQAFRTTDVGRKLIIDQNVFIEGTLPMGVVRPLTEVEMDHYREPFLNPVDREPLWRFPNELPIAGEPANIVALVEEYMDWLHQSPVPKLLFWGTPGVLIPPAEAARLAKSLPNCKAVDIGPGLNLLQEDNPDLIGSEIARWLSTLEISG

SEQ ID NO: 1193 - protein, 277 aa, Synthetic construct
MAHYVDVGPRDGTPVLFLHGNPTSSYVWRNIIPHVAPTHRCIAPDLIGMGKSDKPDLGYFFDDHVRFMDAFIEALGLEEVVLVIHDWGSALGFHWAKRNPERVKGIAFMEFIRPIPTWDEWPEFARETFQAFRTTDVGRKLIIDQNVFIEGTLPMGVVRPLTEVEMDHYREPFLNPVDREPLWRFPNELPIAGEPANIVALVEEYMDWLHQSPVPKLLFWGTPGVLIPPAEAARLAKSLPNCKAVDIGPGLNLLQEDNPDLIGSEIARWLSTLEISG

SEQ ID NO: 1194 - protein, 277 aa, Synthetic construct
MFAYVDVGPRDGTPVLFLHGNPTSSYVWRNIIPHVAPTHRCIAPDLIGMGKSDKPDLGYFFDDHVRFMDAFIEALGLEEVVLVIHDWGSALGFHWAKRNPERVKGIAFMEFIRPIPTWDEWPEFARETFQAFRTTDVGRKLIIDQNVFIEGTLPMGVVRPLTEVEMDHYREPFLNPVDREPLWRFPNELPIAGEPANIVALVEEYMDWLHQSPVPKLLFWGTPGVLIPPAEAARLAKSLPNCKAVDIGPGLNLLQEDNPDLIGSEIARWLSTLEISG

SEQ ID NO: 1195 - protein, 277 aa, Synthetic construct
MFSYVDVGPRDGTPVLFLHGNPTSSYVWRNIIPHVAPTHRCIAPDLIGMGKSDKPDLGYFFDDHVRFMDAFIEALGLEEVVLVIHDWGSALGFHWAKRNPERVKGIAFMEFIRPIPTWDEWPEFARETFQAFRTTDVGRKLIIDQNVFIEGTLPMGVVRPLTEVEMDHYREPFLNPVDREPLWRFPNELPIAGEPANIVALVEEYMDWLHQSPVPKLLFWGTPGVLIPPAEAARLAKSLPNCKAVDIGPGLNLLQEDNPDLIGSEIARWLSTLEISG

SEQ ID NO: 1196 - protein, 277 aa, Synthetic construct
MFNYVDVGPRDGTPVLFLHGNPTSSYVWRNIIPHVAPTHRCIAPDLIGMGKSDKPDLGYFFDDHVRFMDAFIEALGLEEVVLVIHDWGSALGFHWAKRNPERVKGIAFMEFIRPIPTWDEWPEFARETFQAFRTTDVGRKLIIDQNVFIEGTLPMGVVRPLTEVEMDHYREPFLNPVDREPLWRFPNELPIAGEPANIVALVEEYMDWLHQSPVPKLLFWGTPGVLIPPAEAARLAKSLPNCKAVDIGPGLNLLQEDNPDLIGSEIARWLSTLEISG

SEQ ID NO: 1197 - protein, 277 aa, Synthetic construct
MFRYVDVGPRDGTPVLFLHGNPTSSYVWRNIIPHVAPTHRCIAPDLIGMGKSDKPDLGYFFDDHVRFMDAFIEALGLEEVVLVIHDWGSALGFHWAKRNPERVKGIAFMEFIRPIPTWDEWPEFARETFQAFRTTDVGRKLIIDQNVFIEGTLPMGVVRPLTEVEMDHYREPFLNPVDREPLWRFPNELPIAGEPANIVALVEEYMDWLHQSPVPKLLFWGTPGVLIPPAEAARLAKSLPNCKAVDIGPGLNLLQEDNPDLIGSEIARWLSTLEISG

SEQ ID NO: 1198 - protein, 277 aa, Synthetic construct
MFTYVDVGPRDGTPVLFLHGNPTSSYVWRNIIPHVAPTHRCIAPDLIGMGKSDKPDLGYFFDDHVRFMDAFIEALGLEEVVLVIHDWGSALGFHWAKRNPERVKGIAFMEFIRPIPTWDEWPEFARETFQAFRTTDVGRKLIIDQNVFIEGTLPMGVVRPLTEVEMDHYREPFLNPVDREPLWRFPNELPIAGEPANIVALVEEYMDWLHQSPVPKLLFWGTPGVLIPPAEAARLAKSLPNCKAVDIGPGLNLLQEDNPDLIGSEIARWLSTLEISG

SEQ ID NO: 1199 - protein, 277 aa, Synthetic construct
MFQYVDVGPRDGTPVLFLHGNPTSSYVWRNIIPHVAPTHRCIAPDLIGMGKSDKPDLGYFFDDHVRFMDAFIEALGLEEVVLVIHDWGSALGFHWAKRNPERVKGIAFMEFIRPIPTWDEWPEFARETFQAFRTTDVGRKLIIDQNVFIEGTLPMGVVRPLTEVEMDHYREPFLNPVDREPLWRFPNELPIAGEPANIVALVEEYMDWLHQSPVPKLLFWGTPGVLIPPAEAARLAKSLPNCKAVDIGPGLNLLQEDNPDLIGSEIARWLSTLEISG

SEQ ID NO: 1200 - protein, 277 aa, Synthetic construct
MFHFVDVGPRDGTPVLFLHGNPTSSYVWRNIIPHVAPTHRCIAPDLIGMGKSDKPDLGYFFDDHVRFMDAFIEALGLEEVVLVIHDWGSALGFHWAKRNPERVKGIAFMEFIRPIPTWDEWPEFARETFQAFRTTDVGRKLIIDQNVFIEGTLPMGVVRPLTEVEMDHYREPFLNPVDREPLWRFPNELPIAGEPANIVALVEEYMDWLHQSPVPKLLFWGTPGVLIPPAEAARLAKSLPNCKAVDIGPGLNLLQEDNPDLIGSEIARWLSTLEISG

SEQ ID NO: 1201 - protein, 277 aa, Synthetic construct
MFHHVDVGPRDGTPVLFLHGNPTSSYVWRNIIPHVAPTHRCIAPDLIGMGKSDKPDLGYFFDDHVRFMDAFIEALGLEEVVLVIHDWGSALGFHWAKRNPERVKGIAFMEFIRPIPTWDEWPEFARETFQAFRTTDVGRKLIIDQNVFIEGTLPMGVVRPLTEVEMDHYREPFLNPVDREPLWRFPNELPIAGEPANIVALVEEYMDWLHQSPVPKLLFWGTPGVLIPPAEAARLAKSLPNCKAVDIGPGLNLLQEDNPDLIGSEIARWLSTLEISG

SEQ ID NO: 1202 - protein, 277 aa, Synthetic construct
MFHVVDVGPRDGTPVLFLHGNPTSSYVWRNIIPHVAPTHRCIAPDLIGMGKSDKPDLGYFFDDHVRFMDAFIEALGLEEVVLVIHDWGSALGFHWAKRNPERVKGIAFMEFIRPIPTWDEWPEFARETFQAFRTTDVGRKLIIDQNVFIEGTLPMGVVRPLTEVEMDHYREPFLNPVDREPLWRFPNELPIAGEPANIVALVEEYMDWLHQSPVPKLLFWGTPGVLIPPAEAARLAKSLPNCKAVDIGPGLNLLQEDNPDLIGSEIARWLSTLEISG

SEQ ID NO: 1203 - protein, 277 aa, Synthetic construct
MFHCVDVGPRDGTPVLFLHGNPTSSYVWRNIIPHVAPTHRCIAPDLIGMGKSDKPDLGYFFDDHVRFMDAFIEALGLEEVVLVIHDWGSALGFHWAKRNPERVKGIAFMEFIRPIPTWDEWPEFARETFQAFRTTDVGRKLIIDQNVFIEGTLPMGVVRPLTEVEMDHYREPFLNPVDREPLWRFPNELPIAGEPANIVALVEEYMDWLHQSPVPKLLFWGTPGVLIPPAEAARLAKSLPNCKAVDIGPGLNLLQEDNPDLIGSEIARWLSTLEISG

SEQ ID NO: 1204 - protein, 277 aa, Synthetic construct
MFHLVDVGPRDGTPVLFLHGNPTSSYVWRNIIPHVAPTHRCIAPDLIGMGKSDKPDLGYFFDDHVRFMDAFIEALGLEEVVLVIHDWGSALGFHWAKRNPERVKGIAFMEFIRPIPTWDEWPEFARETFQAFRTTDVGRKLIIDQNVFIEGTLPMGVVRPLTEVEMDHYREPFLNPVDREPLWRFPNELPIAGEPANIVALVEEYMDWLHQSPVPKLLFWGTPGVLIPPAEAARLAKSLPNCKAVDIGPGLNLLQEDNPDLIGSEIARWLSTLEISG

SEQ ID NO: 1205 - protein, 277 aa, Synthetic construct
MFHWVDVGPRDGTPVLFLHGNPTSSYVWRNIIPHVAPTHRCIAPDLIGMGKSDKPDLGYFFDDHVRFMDAFIEALGLEEVVLVIHDWGSALGFHWAKRNPERVKGIAFMEFIRPIPTWDEWPEFARETFQAFRTTDVGRKLIIDQNVFIEGTLPMGVVRPLTEVEMDHYREPFLNPVDREPLWRFPNELPIAGEPANIVALVEEYMDWLHQSPVPKLLFWGTPGVLIPPAEAARLAKSLPNCKAVDIGPGLNLLQEDNPDLIGSEIARWLSTLEISG

SEQ ID NO: 1206 - protein, 277 aa, Synthetic construct
MFHYIDVGPRDGTPVLFLHGNPTSSYVWRNIIPHVAPTHRCIAPDLIGMGKSDKPDLGYFFDDHVRFMDAFIEALGLEEVVLVIHDWGSALGFHWAKRNPERVKGIAFMEFIRPIPTWDEWPEFARETFQAFRTTDVGRKLIIDQNVFIEGTLPMGVVRPLTEVEMDHYREPFLNPVDREPLWRFPNELPIAGEPANIVALVEEYMDWLHQSPVPKLLFWGTPGVLIPPAEAARLAKSLPNCKAVDIGPGLNLLQEDNPDLIGSEIARWLSTLEISG

SEQ ID NO: 1207 - protein, 277 aa, Synthetic construct
MFHYLDVGPRDGTPVLFLHGNPTSSYVWRNIIPHVAPTHRCIAPDLIGMGKSDKPDLGYFFDDHVRFMDAFIEALGLEEVVLVIHDWGSALGFHWAKRNPERVKGIAFMEFIRPIPTWDEWPEFARETFQAFRTTDVGRKLIIDQNVFIEGTLPMGVVRPLTEVEMDHYREPFLNPVDREPLWRFPNELPIAGEPANIVALVEEYMDWLHQSPVPKLLFWGTPGVLIPPAEAARLAKSLPNCKAVDIGPGLNLLQEDNPDLIGSEIARWLSTLEISG

SEQ ID NO: 1208 - protein, 277 aa, Synthetic construct
MFHYRDVGPRDGTPVLFLHGNPTSSYVWRNIIPHVAPTHRCIAPDLIGMGKSDKPDLGYFFDDHVRFMDAFIEALGLEEVVLVIHDWGSALGFHWAKRNPERVKGIAFMEFIRPIPTWDEWPEFARETFQAFRTTDVGRKLIIDQNVFIEGTLPMGVVRPLTEVEMDHYREPFLNPVDREPLWRFPNELPIAGEPANIVALVEEYMDWLHQSPVPKLLFWGTPGVLIPPAEAARLAKSLPNCKAVDIGPGLNLLQEDNPDLIGSEIARWLSTLEISG

SEQ ID NO: 1209 - protein, 277 aa, Synthetic construct
MFHYTDVGPRDGTPVLFLHGNPTSSYVWRNIIPHVAPTHRCIAPDLIGMGKSDKPDLGYFFDDHVRFMDAFIEALGLEEVVLVIHDWGSALGFHWAKRNPERVKGIAFMEFIRPIPTWDEWPEFARETFQAFRTTDVGRKLIIDQNVFIEGTLPMGVVRPLTEVEMDHYREPFLNPVDREPLWRFPNELPIAGEPANIVALVEEYMDWLHQSPVPKLLFWGTPGVLIPPAEAARLAKSLPNCKAVDIGPGLNLLQEDNPDLIGSEIARWLSTLEISG

SEQ ID NO: 1210 - protein, 277 aa, Synthetic construct
MFHYEDVGPRDGTPVLFLHGNPTSSYVWRNIIPHVAPTHRCIAPDLIGMGKSDKPDLGYFFDDHVRFMDAFIEALGLEEVVLVIHDWGSALGFHWAKRNPERVKGIAFMEFIRPIPTWDEWPEFARETFQAFRTTDVGRKLIIDQNVFIEGTLPMGVVRPLTEVEMDHYREPFLNPVDREPLWRFPNELPIAGEPANIVALVEEYMDWLHQSPVPKLLFWGTPGVLIPPAEAARLAKSLPNCKAVDIGPGLNLLQEDNPDLIGSEIARWLSTLEISG

SEQ ID NO: 1211 - protein, 277 aa, Synthetic construct
MFHYHDVGPRDGTPVLFLHGNPTSSYVWRNIIPHVAPTHRCIAPDLIGMGKSDKPDLGYFFDDHVRFMDAFIEALGLEEVVLVIHDWGSALGFHWAKRNPERVKGIAFMEFIRPIPTWDEWPEFARETFQAFRTTDVGRKLIIDQNVFIEGTLPMGVVRPLTEVEMDHYREPFLNPVDREPLWRFPNELPIAGEPANIVALVEEYMDWLHQSPVPKLLFWGTPGVLIPPAEAARLAKSLPNCKAVDIGPGLNLLQEDNPDLIGSEIARWLSTLEISG

SEQ ID NO: 1212 - protein, 277 aa, Synthetic construct
MFHYVEVGPRDGTPVLFLHGNPTSSYVWRNIIPHVAPTHRCIAPDLIGMGKSDKPDLGYFFDDHVRFMDAFIEALGLEEVVLVIHDWGSALGFHWAKRNPERVKGIAFMEFIRPIPTWDEWPEFARETFQAFRTTDVGRKLIIDQNVFIEGTLPMGVVRPLTEVEMDHYREPFLNPVDREPLWRFPNELPIAGEPANIVALVEEYMDWLHQSPVPKLLFWGTPGVLIPPAEAARLAKSLPNCKAVDIGPGLNLLQEDNPDLIGSEIARWLSTLEISG

SEQ ID NO: 1213 - protein, 277 aa, Synthetic construct
MFHYVAVGPRDGTPVLFLHGNPTSSYVWRNIIPHVAPTHRCIAPDLIGMGKSDKPDLGYFFDDHVRFMDAFIEALGLEEVVLVIHDWGSALGFHWAKRNPERVKGIAFMEFIRPIPTWDEWPEFARETFQAFRTTDVGRKLIIDQNVFIEGTLPMGVVRPLTEVEMDHYREPFLNPVDREPLWRFPNELPIAGEPANIVALVEEYMDWLHQSPVPKLLFWGTPGVLIPPAEAARLAKSLPNCKAVDIGPGLNLLQEDNPDLIGSEIARWLSTLEISG

SEQ ID NO: 1214 - protein, 277 aa, Synthetic construct
MFHYVSVGPRDGTPVLFLHGNPTSSYVWRNIIPHVAPTHRCIAPDLIGMGKSDKPDLGYFFDDHVRFMDAFIEALGLEEVVLVIHDWGSALGFHWAKRNPERVKGIAFMEFIRPIPTWDEWPEFARETFQAFRTTDVGRKLIIDQNVFIEGTLPMGVVRPLTEVEMDHYREPFLNPVDREPLWRFPNELPIAGEPANIVALVEEYMDWLHQSPVPKLLFWGTPGVLIPPAEAARLAKSLPNCKAVDIGPGLNLLQEDNPDLIGSEIARWLSTLEISG

SEQ ID NO: 1215 - protein, 277 aa, Synthetic construct
MFHYVQVGPRDGTPVLFLHGNPTSSYVWRNIIPHVAPTHRCIAPDLIGMGKSDKPDLGYFFDDHVRFMDAFIEALGLEEVVLVIHDWGSALGFHWAKRNPERVKGIAFMEFIRPIPTWDEWPEFARETFQAFRTTDVGRKLIIDQNVFIEGTLPMGVVRPLTEVEMDHYREPFLNPVDREPLWRFPNELPIAGEPANIVALVEEYMDWLHQSPVPKLLFWGTPGVLIPPAEAARLAKSLPNCKAVDIGPGLNLLQEDNPDLIGSEIARWLSTLEISG

SEQ ID NO: 1216 - protein, 277 aa, Synthetic construct
MFHYVTVGPRDGTPVLFLHGNPTSSYVWRNIIPHVAPTHRCIAPDLIGMGKSDKPDLGYFFDDHVRFMDAFIEALGLEEVVLVIHDWGSALGFHWAKRNPERVKGIAFMEFIRPIPTWDEWPEFARETFQAFRTTDVGRKLIIDQNVFIEGTLPMGVVRPLTEVEMDHYREPFLNPVDREPLWRFPNELPIAGEPANIVALVEEYMDWLHQSPVPKLLFWGTPGVLIPPAEAARLAKSLPNCKAVDIGPGLNLLQEDNPDLIGSEIARWLSTLEISG

SEQ ID NO: 1217 - protein, 277 aa, Synthetic construct
MFHYVNVGPRDGTPVLFLHGNPTSSYVWRNIIPHVAPTHRCIAPDLIGMGKSDKPDLGYFFDDHVRFMDAFIEALGLEEVVLVIHDWGSALGFHWAKRNPERVKGIAFMEFIRPIPTWDEWPEFARETFQAFRTTDVGRKLIIDQNVFIEGTLPMGVVRPLTEVEMDHYREPFLNPVDREPLWRFPNELPIAGEPANIVALVEEYMDWLHQSPVPKLLFWGTPGVLIPPAEAARLAKSLPNCKAVDIGPGLNLLQEDNPDLIGSEIARWLSTLEISG

SEQ ID NO: 1218 - protein, 277 aa, Synthetic construct
MFHYVDEGPRDGTPVLFLHGNPTSSYVWRNIIPHVAPTHRCIAPDLIGMGKSDKPDLGYFFDDHVRFMDAFIEALGLEEVVLVIHDWGSALGFHWAKRNPERVKGIAFMEFIRPIPTWDEWPEFARETFQAFRTTDVGRKLIIDQNVFIEGTLPMGVVRPLTEVEMDHYREPFLNPVDREPLWRFPNELPIAGEPANIVALVEEYMDWLHQSPVPKLLFWGTPGVLIPPAEAARLAKSLPNCKAVDIGPGLNLLQEDNPDLIGSEIARWLSTLEISG

SEQ ID NO: 1219 - protein, 277 aa, Synthetic construct
MFHYVDTGPRDGTPVLFLHGNPTSSYVWRNIIPHVAPTHRCIAPDLIGMGKSDKPDLGYFFDDHVRFMDAFIEALGLEEVVLVIHDWGSALGFHWAKRNPERVKGIAFMEFIRPIPTWDEWPEFARETFQAFRTTDVGRKLIIDQNVFIEGTLPMGVVRPLTEVEMDHYREPFLNPVDREPLWRFPNELPIAGEPANIVALVEEYMDWLHQSPVPKLLFWGTPGVLIPPAEAARLAKSLPNCKAVDIGPGLNLLQEDNPDLIGSEIARWLSTLEISG

SEQ ID NO: 1220 - protein, 277 aa, Synthetic construct
MFHYVDAGPRDGTPVLFLHGNPTSSYVWRNIIPHVAPTHRCIAPDLIGMGKSDKPDLGYFFDDHVRFMDAFIEALGLEEVVLVIHDWGSALGFHWAKRNPERVKGIAFMEFIRPIPTWDEWPEFARETFQAFRTTDVGRKLIIDQNVFIEGTLPMGVVRPLTEVEMDHYREPFLNPVDREPLWRFPNELPIAGEPANIVALVEEYMDWLHQSPVPKLLFWGTPGVLIPPAEAARLAKSLPNCKAVDIGPGLNLLQEDNPDLIGSEIARWLSTLEISG

SEQ ID NO: 1221 - protein, 277 aa, Synthetic construct
MFHYVDSGPRDGTPVLFLHGNPTSSYVWRNIIPHVAPTHRCIAPDLIGMGKSDKPDLGYFFDDHVRFMDAFIEALGLEEVVLVIHDWGSALGFHWAKRNPERVKGIAFMEFIRPIPTWDEWPEFARETFQAFRTTDVGRKLIIDQNVFIEGTLPMGVVRPLTEVEMDHYREPFLNPVDREPLWRFPNELPIAGEPANIVALVEEYMDWLHQSPVPKLLFWGTPGVLIPPAEAARLAKSLPNCKAVDIGPGLNLLQEDNPDLIGSEIARWLSTLEISG

SEQ ID NO: 1222 - protein, 277 aa, Synthetic construct
MFHYVDQGPRDGTPVLFLHGNPTSSYVWRNIIPHVAPTHRCIAPDLIGMGKSDKPDLGYFFDDHVRFMDAFIEALGLEEVVLVIHDWGSALGFHWAKRNPERVKGIAFMEFIRPIPTWDEWPEFARETFQAFRTTDVGRKLIIDQNVFIEGTLPMGVVRPLTEVEMDHYREPFLNPVDREPLWRFPNELPIAGEPANIVALVEEYMDWLHQSPVPKLLFWGTPGVLIPPAEAARLAKSLPNCKAVDIGPGLNLLQEDNPDLIGSEIARWLSTLEISG

SEQ ID NO: 1223 - protein, 277 aa, Synthetic construct
MFHYVDDGPRDGTPVLFLHGNPTSSYVWRNIIPHVAPTHRCIAPDLIGMGKSDKPDLGYFFDDHVRFMDAFIEALGLEEVVLVIHDWGSALGFHWAKRNPERVKGIAFMEFIRPIPTWDEWPEFARETFQAFRTTDVGRKLIIDQNVFIEGTLPMGVVRPLTEVEMDHYREPFLNPVDREPLWRFPNELPIAGEPANIVALVEEYMDWLHQSPVPKLLFWGTPGVLIPPAEAARLAKSLPNCKAVDIGPGLNLLQEDNPDLIGSEIARWLSTLEISG

SEQ ID NO: 1224 - protein, 277 aa, Synthetic construct
MFHYVDVAPRDGTPVLFLHGNPTSSYVWRNIIPHVAPTHRCIAPDLIGMGKSDKPDLGYFFDDHVRFMDAFIEALGLEEVVLVIHDWGSALGFHWAKRNPERVKGIAFMEFIRPIPTWDEWPEFARETFQAFRTTDVGRKLIIDQNVFIEGTLPMGVVRPLTEVEMDHYREPFLNPVDREPLWRFPNELPIAGEPANIVALVEEYMDWLHQSPVPKLLFWGTPGVLIPPAEAARLAKSLPNCKAVDIGPGLNLLQEDNPDLIGSEIARWLSTLEISG

SEQ ID NO: 1225 - protein, 277 aa, Synthetic construct
MFHYVDVDPRDGTPVLFLHGNPTSSYVWRNIIPHVAPTHRCIAPDLIGMGKSDKPDLGYFFDDHVRFMDAFIEALGLEEVVLVIHDWGSALGFHWAKRNPERVKGIAFMEFIRPIPTWDEWPEFARETFQAFRTTDVGRKLIIDQNVFIEGTLPMGVVRPLTEVEMDHYREPFLNPVDREPLWRFPNELPIAGEPANIVALVEEYMDWLHQSPVPKLLFWGTPGVLIPPAEAARLAKSLPNCKAVDIGPGLNLLQEDNPDLIGSEIARWLSTLEISG

SEQ ID NO: 1226 - protein, 277 aa, Synthetic construct
MFHYVDVNPRDGTPVLFLHGNPTSSYVWRNIIPHVAPTHRCIAPDLIGMGKSDKPDLGYFFDDHVRFMDAFIEALGLEEVVLVIHDWGSALGFHWAKRNPERVKGIAFMEFIRPIPTWDEWPEFARETFQAFRTTDVGRKLIIDQNVFIEGTLPMGVVRPLTEVEMDHYREPFLNPVDREPLWRFPNELPIAGEPANIVALVEEYMDWLHQSPVPKLLFWGTPGVLIPPAEAARLAKSLPNCKAVDIGPGLNLLQEDNPDLIGSEIARWLSTLEISG

SEQ ID NO: 1227 - protein, 277 aa, Synthetic construct
MFHYVDVEPRDGTPVLFLHGNPTSSYVWRNIIPHVAPTHRCIAPDLIGMGKSDKPDLGYFFDDHVRFMDAFIEALGLEEVVLVIHDWGSALGFHWAKRNPERVKGIAFMEFIRPIPTWDEWPEFARETFQAFRTTDVGRKLIIDQNVFIEGTLPMGVVRPLTEVEMDHYREPFLNPVDREPLWRFPNELPIAGEPANIVALVEEYMDWLHQSPVPKLLFWGTPGVLIPPAEAARLAKSLPNCKAVDIGPGLNLLQEDNPDLIGSEIARWLSTLEISG

SEQ ID NO: 1228 - protein, 277 aa, Synthetic construct
MFHYVDVSPRDGTPVLFLHGNPTSSYVWRNIIPHVAPTHRCIAPDLIGMGKSDKPDLGYFFDDHVRFMDAFIEALGLEEVVLVIHDWGSALGFHWAKRNPERVKGIAFMEFIRPIPTWDEWPEFARETFQAFRTTDVGRKLIIDQNVFIEGTLPMGVVRPLTEVEMDHYREPFLNPVDREPLWRFPNELPIAGEPANIVALVEEYMDWLHQSPVPKLLFWGTPGVLIPPAEAARLAKSLPNCKAVDIGPGLNLLQEDNPDLIGSEIARWLSTLEISG

SEQ ID NO: 1229 - protein, 277 aa, Synthetic construct
MFHYVDVRPRDGTPVLFLHGNPTSSYVWRNIIPHVAPTHRCIAPDLIGMGKSDKPDLGYFFDDHVRFMDAFIEALGLEEVVLVIHDWGSALGFHWAKRNPERVKGIAFMEFIRPIPTWDEWPEFARETFQAFRTTDVGRKLIIDQNVFIEGTLPMGVVRPLTEVEMDHYREPFLNPVDREPLWRFPNELPIAGEPANIVALVEEYMDWLHQSPVPKLLFWGTPGVLIPPAEAARLAKSLPNCKAVDIGPGLNLLQEDNPDLIGSEIARWLSTLEISG

SEQ ID NO: 1230 - protein, 277 aa, Synthetic construct
MFHYVDVGARDGTPVLFLHGNPTSSYVWRNIIPHVAPTHRCIAPDLIGMGKSDKPDLGYFFDDHVRFMDAFIEALGLEEVVLVIHDWGSALGFHWAKRNPERVKGIAFMEFIRPIPTWDEWPEFARETFQAFRTTDVGRKLIIDQNVFIEGTLPMGVVRPLTEVEMDHYREPFLNPVDREPLWRFPNELPIAGEPANIVALVEEYMDWLHQSPVPKLLFWGTPGVLIPPAEAARLAKSLPNCKAVDIGPGLNLLQEDNPDLIGSEIARWLSTLEISG

SEQ ID NO: 1231 - protein, 277 aa, Synthetic construct
MFHYVDVGSRDGTPVLFLHGNPTSSYVWRNIIPHVAPTHRCIAPDLIGMGKSDKPDLGYFFDDHVRFMDAFIEALGLEEVVLVIHDWGSALGFHWAKRNPERVKGIAFMEFIRPIPTWDEWPEFARETFQAFRTTDVGRKLIIDQNVFIEGTLPMGVVRPLTEVEMDHYREPFLNPVDREPLWRFPNELPIAGEPANIVALVEEYMDWLHQSPVPKLLFWGTPGVLIPPAEAARLAKSLPNCKAVDIGPGLNLLQEDNPDLIGSEIARWLSTLEISG

SEQ ID NO: 1232 - protein, 277 aa, Synthetic construct
MFHYVDVGERDGTPVLFLHGNPTSSYVWRNIIPHVAPTHRCIAPDLIGMGKSDKPDLGYFFDDHVRFMDAFIEALGLEEVVLVIHDWGSALGFHWAKRNPERVKGIAFMEFIRPIPTWDEWPEFARETFQAFRTTDVGRKLIIDQNVFIEGTLPMGVVRPLTEVEMDHYREPFLNPVDREPLWRFPNELPIAGEPANIVALVEEYMDWLHQSPVPKLLFWGTPGVLIPPAEAARLAKSLPNCKAVDIGPGLNLLQEDNPDLIGSEIARWLSTLEISG

SEQ ID NO: 1233 - protein, 277 aa, Synthetic construct
MFHYVDVGDRDGTPVLFLHGNPTSSYVWRNIIPHVAPTHRCIAPDLIGMGKSDKPDLGYFFDDHVRFMDAFIEALGLEEVVLVIHDWGSALGFHWAKRNPERVKGIAFMEFIRPIPTWDEWPEFARETFQAFRTTDVGRKLIIDQNVFIEGTLPMGVVRPLTEVEMDHYREPFLNPVDREPLWRFPNELPIAGEPANIVALVEEYMDWLHQSPVPKLLFWGTPGVLIPPAEAARLAKSLPNCKAVDIGPGLNLLQEDNPDLIGSEIARWLSTLEISG

SEQ ID NO: 1234 - protein, 277 aa, Synthetic construct
MFHYVDVGNRDGTPVLFLHGNPTSSYVWRNIIPHVAPTHRCIAPDLIGMGKSDKPDLGYFFDDHVRFMDAFIEALGLEEVVLVIHDWGSALGFHWAKRNPERVKGIAFMEFIRPIPTWDEWPEFARETFQAFRTTDVGRKLIIDQNVFIEGTLPMGVVRPLTEVEMDHYREPFLNPVDREPLWRFPNELPIAGEPANIVALVEEYMDWLHQSPVPKLLFWGTPGVLIPPAEAARLAKSLPNCKAVDIGPGLNLLQEDNPDLIGSEIARWLSTLEISG

SEQ ID NO: 1235 - protein, 277 aa, Synthetic construct
MFHYVDVGRRDGTPVLFLHGNPTSSYVWRNIIPHVAPTHRCIAPDLIGMGKSDKPDLGYFFDDHVRFMDAFIEALGLEEVVLVIHDWGSALGFHWAKRNPERVKGIAFMEFIRPIPTWDEWPEFARETFQAFRTTDVGRKLIIDQNVFIEGTLPMGVVRPLTEVEMDHYREPFLNPVDREPLWRFPNELPIAGEPANIVALVEEYMDWLHQSPVPKLLFWGTPGVLIPPAEAARLAKSLPNCKAVDIGPGLNLLQEDNPDLIGSEIARWLSTLEISG

SEQ ID NO: 1236 - protein, 277 aa, Synthetic construct
MFHYVDVGPKDGTPVLFLHGNPTSSYVWRNIIPHVAPTHRCIAPDLIGMGKSDKPDLGYFFDDHVRFMDAFIEALGLEEVVLVIHDWGSALGFHWAKRNPERVKGIAFMEFIRPIPTWDEWPEFARETFQAFRTTDVGRKLIIDQNVFIEGTLPMGVVRPLTEVEMDHYREPFLNPVDREPLWRFPNELPIAGEPANIVALVEEYMDWLHQSPVPKLLFWGTPGVLIPPAEAARLAKSLPNCKAVDIGPGLNLLQEDNPDLIGSEIARWLSTLEISG

SEQ ID NO: 1237 - protein, 277 aa, Synthetic construct
MFHYVDVGPADGTPVLFLHGNPTSSYVWRNIIPHVAPTHRCIAPDLIGMGKSDKPDLGYFFDDHVRFMDAFIEALGLEEVVLVIHDWGSALGFHWAKRNPERVKGIAFMEFIRPIPTWDEWPEFARETFQAFRTTDVGRKLIIDQNVFIEGTLPMGVVRPLTEVEMDHYREPFLNPVDREPLWRFPNELPIAGEPANIVALVEEYMDWLHQSPVPKLLFWGTPGVLIPPAEAARLAKSLPNCKAVDIGPGLNLLQEDNPDLIGSEIARWLSTLEISG

SEQ ID NO: 1238 - protein, 277 aa, Synthetic construct
MFHYVDVGPSDGTPVLFLHGNPTSSYVWRNIIPHVAPTHRCIAPDLIGMGKSDKPDLGYFFDDHVRFMDAFIEALGLEEVVLVIHDWGSALGFHWAKRNPERVKGIAFMEFIRPIPTWDEWPEFARETFQAFRTTDVGRKLIIDQNVFIEGTLPMGVVRPLTEVEMDHYREPFLNPVDREPLWRFPNELPIAGEPANIVALVEEYMDWLHQSPVPKLLFWGTPGVLIPPAEAARLAKSLPNCKAVDIGPGLNLLQEDNPDLIGSEIARWLSTLEISG

SEQ ID NO: 1239 - protein, 277 aa, Synthetic construct
MFHYVDVGPEDGTPVLFLHGNPTSSYVWRNIIPHVAPTHRCIAPDLIGMGKSDKPDLGYFFDDHVRFMDAFIEALGLEEVVLVIHDWGSALGFHWAKRNPERVKGIAFMEFIRPIPTWDEWPEFARETFQAFRTTDVGRKLIIDQNVFIEGTLPMGVVRPLTEVEMDHYREPFLNPVDREPLWRFPNELPIAGEPANIVALVEEYMDWLHQSPVPKLLFWGTPGVLIPPAEAARLAKSLPNCKAVDIGPGLNLLQEDNPDLIGSEIARWLSTLEISG

SEQ ID NO: 1240 - protein, 277 aa, Synthetic construct
MFHYVDVGPTDGTPVLFLHGNPTSSYVWRNIIPHVAPTHRCIAPDLIGMGKSDKPDLGYFFDDHVRFMDAFIEALGLEEVVLVIHDWGSALGFHWAKRNPERVKGIAFMEFIRPIPTWDEWPEFARETFQAFRTTDVGRKLIIDQNVFIEGTLPMGVVRPLTEVEMDHYREPFLNPVDREPLWRFPNELPIAGEPANIVALVEEYMDWLHQSPVPKLLFWGTPGVLIPPAEAARLAKSLPNCKAVDIGPGLNLLQEDNPDLIGSEIARWLSTLEISG

SEQ ID NO: 1241 - protein, 277 aa, Synthetic construct
MFHYVDVGPQDGTPVLFLHGNPTSSYVWRNIIPHVAPTHRCIAPDLIGMGKSDKPDLGYFFDDHVRFMDAFIEALGLEEVVLVIHDWGSALGFHWAKRNPERVKGIAFMEFIRPIPTWDEWPEFARETFQAFRTTDVGRKLIIDQNVFIEGTLPMGVVRPLTEVEMDHYREPFLNPVDREPLWRFPNELPIAGEPANIVALVEEYMDWLHQSPVPKLLFWGTPGVLIPPAEAARLAKSLPNCKAVDIGPGLNLLQEDNPDLIGSEIARWLSTLEISG

SEQ ID NO: 1242 - protein, 277 aa, Synthetic construct
MFHYVDVGPREGTPVLFLHGNPTSSYVWRNIIPHVAPTHRCIAPDLIGMGKSDKPDLGYFFDDHVRFMDAFIEALGLEEVVLVIHDWGSALGFHWAKRNPERVKGIAFMEFIRPIPTWDEWPEFARETFQAFRTTDVGRKLIIDQNVFIEGTLPMGVVRPLTEVEMDHYREPFLNPVDREPLWRFPNELPIAGEPANIVALVEEYMDWLHQSPVPKLLFWGTPGVLIPPAEAARLAKSLPNCKAVDIGPGLNLLQEDNPDLIGSEIARWLSTLEISG

SEQ ID NO: 1243 - protein, 277 aa, Synthetic construct
MFHYVDVGPRNGTPVLFLHGNPTSSYVWRNIIPHVAPTHRCIAPDLIGMGKSDKPDLGYFFDDHVRFMDAFIEALGLEEVVLVIHDWGSALGFHWAKRNPERVKGIAFMEFIRPIPTWDEWPEFARETFQAFRTTDVGRKLIIDQNVFIEGTLPMGVVRPLTEVEMDHYREPFLNPVDREPLWRFPNELPIAGEPANIVALVEEYMDWLHQSPVPKLLFWGTPGVLIPPAEAARLAKSLPNCKAVDIGPGLNLLQEDNPDLIGSEIARWLSTLEISG

SEQ ID NO: 1244 - protein, 277 aa, Synthetic construct
MFHYVDVGPRGGTPVLFLHGNPTSSYVWRNIIPHVAPTHRCIAPDLIGMGKSDKPDLGYFFDDHVRFMDAFIEALGLEEVVLVIHDWGSALGFHWAKRNPERVKGIAFMEFIRPIPTWDEWPEFARETFQAFRTTDVGRKLIIDQNVFIEGTLPMGVVRPLTEVEMDHYREPFLNPVDREPLWRFPNELPIAGEPANIVALVEEYMDWLHQSPVPKLLFWGTPGVLIPPAEAARLAKSLPNCKAVDIGPGLNLLQEDNPDLIGSEIARWLSTLEISG

SEQ ID NO: 1245 - protein, 277 aa, Synthetic construct
MFHYVDVGPRSGTPVLFLHGNPTSSYVWRNIIPHVAPTHRCIAPDLIGMGKSDKPDLGYFFDDHVRFMDAFIEALGLEEVVLVIHDWGSALGFHWAKRNPERVKGIAFMEFIRPIPTWDEWPEFARETFQAFRTTDVGRKLIIDQNVFIEGTLPMGVVRPLTEVEMDHYREPFLNPVDREPLWRFPNELPIAGEPANIVALVEEYMDWLHQSPVPKLLFWGTPGVLIPPAEAARLAKSLPNCKAVDIGPGLNLLQEDNPDLIGSEIARWLSTLEISG

SEQ ID NO: 1246 - protein, 277 aa, Synthetic construct
MFHYVDVGPRTGTPVLFLHGNPTSSYVWRNIIPHVAPTHRCIAPDLIGMGKSDKPDLGYFFDDHVRFMDAFIEALGLEEVVLVIHDWGSALGFHWAKRNPERVKGIAFMEFIRPIPTWDEWPEFARETFQAFRTTDVGRKLIIDQNVFIEGTLPMGVVRPLTEVEMDHYREPFLNPVDREPLWRFPNELPIAGEPANIVALVEEYMDWLHQSPVPKLLFWGTPGVLIPPAEAARLAKSLPNCKAVDIGPGLNLLQEDNPDLIGSEIARWLSTLEISG

SEQ ID NO: 1247 - protein, 277 aa, Synthetic construct
MFHYVDVGPRAGTPVLFLHGNPTSSYVWRNIIPHVAPTHRCIAPDLIGMGKSDKPDLGYFFDDHVRFMDAFIEALGLEEVVLVIHDWGSALGFHWAKRNPERVKGIAFMEFIRPIPTWDEWPEFARETFQAFRTTDVGRKLIIDQNVFIEGTLPMGVVRPLTEVEMDHYREPFLNPVDREPLWRFPNELPIAGEPANIVALVEEYMDWLHQSPVPKLLFWGTPGVLIPPAEAARLAKSLPNCKAVDIGPGLNLLQEDNPDLIGSEIARWLSTLEISG

SEQ ID NO: 1248 - protein, 277 aa, Synthetic construct
MFHYVDVGPRDATPVLFLHGNPTSSYVWRNIIPHVAPTHRCIAPDLIGMGKSDKPDLGYFFDDHVRFMDAFIEALGLEEVVLVIHDWGSALGFHWAKRNPERVKGIAFMEFIRPIPTWDEWPEFARETFQAFRTTDVGRKLIIDQNVFIEGTLPMGVVRPLTEVEMDHYREPFLNPVDREPLWRFPNELPIAGEPANIVALVEEYMDWLHQSPVPKLLFWGTPGVLIPPAEAARLAKSLPNCKAVDIGPGLNLLQEDNPDLIGSEIARWLSTLEISG

SEQ ID NO: 1249 - protein, 277 aa, Synthetic construct
MFHYVDVGPRDSTPVLFLHGNPTSSYVWRNIIPHVAPTHRCIAPDLIGMGKSDKPDLGYFFDDHVRFMDAFIEALGLEEVVLVIHDWGSALGFHWAKRNPERVKGIAFMEFIRPIPTWDEWPEFARETFQAFRTTDVGRKLIIDQNVFIEGTLPMGVVRPLTEVEMDHYREPFLNPVDREPLWRFPNELPIAGEPANIVALVEEYMDWLHQSPVPKLLFWGTPGVLIPPAEAARLAKSLPNCKAVDIGPGLNLLQEDNPDLIGSEIARWLSTLEISG

SEQ ID NO: 1250 - protein, 277 aa, Synthetic construct
MFHYVDVGPRDKTPVLFLHGNPTSSYVWRNIIPHVAPTHRCIAPDLIGMGKSDKPDLGYFFDDHVRFMDAFIEALGLEEVVLVIHDWGSALGFHWAKRNPERVKGIAFMEFIRPIPTWDEWPEFARETFQAFRTTDVGRKLIIDQNVFIEGTLPMGVVRPLTEVEMDHYREPFLNPVDREPLWRFPNELPIAGEPANIVALVEEYMDWLHQSPVPKLLFWGTPGVLIPPAEAARLAKSLPNCKAVDIGPGLNLLQEDNPDLIGSEIARWLSTLEISG

SEQ ID NO: 1251 - protein, 277 aa, Synthetic construct
MFHYVDVGPRDRTPVLFLHGNPTSSYVWRNIIPHVAPTHRCIAPDLIGMGKSDKPDLGYFFDDHVRFMDAFIEALGLEEVVLVIHDWGSALGFHWAKRNPERVKGIAFMEFIRPIPTWDEWPEFARETFQAFRTTDVGRKLIIDQNVFIEGTLPMGVVRPLTEVEMDHYREPFLNPVDREPLWRFPNELPIAGEPANIVALVEEYMDWLHQSPVPKLLFWGTPGVLIPPAEAARLAKSLPNCKAVDIGPGLNLLQEDNPDLIGSEIARWLSTLEISG

SEQ ID NO: 1252 - protein, 277 aa, Synthetic construct
MFHYVDVGPRDTTPVLFLHGNPTSSYVWRNIIPHVAPTHRCIAPDLIGMGKSDKPDLGYFFDDHVRFMDAFIEALGLEEVVLVIHDWGSALGFHWAKRNPERVKGIAFMEFIRPIPTWDEWPEFARETFQAFRTTDVGRKLIIDQNVFIEGTLPMGVVRPLTEVEMDHYREPFLNPVDREPLWRFPNELPIAGEPANIVALVEEYMDWLHQSPVPKLLFWGTPGVLIPPAEAARLAKSLPNCKAVDIGPGLNLLQEDNPDLIGSEIARWLSTLEISG

SEQ ID NO: 1253 - protein, 277 aa, Synthetic construct
MFHYVDVGPRDQTPVLFLHGNPTSSYVWRNIIPHVAPTHRCIAPDLIGMGKSDKPDLGYFFDDHVRFMDAFIEALGLEEVVLVIHDWGSALGFHWAKRNPERVKGIAFMEFIRPIPTWDEWPEFARETFQAFRTTDVGRKLIIDQNVFIEGTLPMGVVRPLTEVEMDHYREPFLNPVDREPLWRFPNELPIAGEPANIVALVEEYMDWLHQSPVPKLLFWGTPGVLIPPAEAARLAKSLPNCKAVDIGPGLNLLQEDNPDLIGSEIARWLSTLEISG

SEQ ID NO: 1254 - protein, 277 aa, Synthetic construct
MFHYVDVGPRDGLPVLFLHGNPTSSYVWRNIIPHVAPTHRCIAPDLIGMGKSDKPDLGYFFDDHVRFMDAFIEALGLEEVVLVIHDWGSALGFHWAKRNPERVKGIAFMEFIRPIPTWDEWPEFARETFQAFRTTDVGRKLIIDQNVFIEGTLPMGVVRPLTEVEMDHYREPFLNPVDREPLWRFPNELPIAGEPANIVALVEEYMDWLHQSPVPKLLFWGTPGVLIPPAEAARLAKSLPNCKAVDIGPGLNLLQEDNPDLIGSEIARWLSTLEISG

SEQ ID NO: 1255 - protein, 277 aa, Synthetic construct
MFHYVDVGPRDGVPVLFLHGNPTSSYVWRNIIPHVAPTHRCIAPDLIGMGKSDKPDLGYFFDDHVRFMDAFIEALGLEEVVLVIHDWGSALGFHWAKRNPERVKGIAFMEFIRPIPTWDEWPEFARETFQAFRTTDVGRKLIIDQNVFIEGTLPMGVVRPLTEVEMDHYREPFLNPVDREPLWRFPNELPIAGEPANIVALVEEYMDWLHQSPVPKLLFWGTPGVLIPPAEAARLAKSLPNCKAVDIGPGLNLLQEDNPDLIGSEIARWLSTLEISG

SEQ ID NO: 1256 - protein, 277 aa, Synthetic construct
MFHYVDVGPRDGAPVLFLHGNPTSSYVWRNIIPHVAPTHRCIAPDLIGMGKSDKPDLGYFFDDHVRFMDAFIEALGLEEVVLVIHDWGSALGFHWAKRNPERVKGIAFMEFIRPIPTWDEWPEFARETFQAFRTTDVGRKLIIDQNVFIEGTLPMGVVRPLTEVEMDHYREPFLNPVDREPLWRFPNELPIAGEPANIVALVEEYMDWLHQSPVPKLLFWGTPGVLIPPAEAARLAKSLPNCKAVDIGPGLNLLQEDNPDLIGSEIARWLSTLEISG

SEQ ID NO: 1257 - protein, 277 aa, Synthetic construct
MFHYVDVGPRDGRPVLFLHGNPTSSYVWRNIIPHVAPTHRCIAPDLIGMGKSDKPDLGYFFDDHVRFMDAFIEALGLEEVVLVIHDWGSALGFHWAKRNPERVKGIAFMEFIRPIPTWDEWPEFARETFQAFRTTDVGRKLIIDQNVFIEGTLPMGVVRPLTEVEMDHYREPFLNPVDREPLWRFPNELPIAGEPANIVALVEEYMDWLHQSPVPKLLFWGTPGVLIPPAEAARLAKSLPNCKAVDIGPGLNLLQEDNPDLIGSEIARWLSTLEISG

SEQ ID NO: 1258 - protein, 277 aa, Synthetic construct
MFHYVDVGPRDGQPVLFLHGNPTSSYVWRNIIPHVAPTHRCIAPDLIGMGKSDKPDLGYFFDDHVRFMDAFIEALGLEEVVLVIHDWGSALGFHWAKRNPERVKGIAFMEFIRPIPTWDEWPEFARETFQAFRTTDVGRKLIIDQNVFIEGTLPMGVVRPLTEVEMDHYREPFLNPVDREPLWRFPNELPIAGEPANIVALVEEYMDWLHQSPVPKLLFWGTPGVLIPPAEAARLAKSLPNCKAVDIGPGLNLLQEDNPDLIGSEIARWLSTLEISG

SEQ ID NO: 1259 - protein, 277 aa, Synthetic construct
MFHYVDVGPRDGPPVLFLHGNPTSSYVWRNIIPHVAPTHRCIAPDLIGMGKSDKPDLGYFFDDHVRFMDAFIEALGLEEVVLVIHDWGSALGFHWAKRNPERVKGIAFMEFIRPIPTWDEWPEFARETFQAFRTTDVGRKLIIDQNVFIEGTLPMGVVRPLTEVEMDHYREPFLNPVDREPLWRFPNELPIAGEPANIVALVEEYMDWLHQSPVPKLLFWGTPGVLIPPAEAARLAKSLPNCKAVDIGPGLNLLQEDNPDLIGSEIARWLSTLEISG

SEQ ID NO: 1260 - protein, 277 aa, Synthetic construct
MFHYVDVGPRDGTAVLFLHGNPTSSYVWRNIIPHVAPTHRCIAPDLIGMGKSDKPDLGYFFDDHVRFMDAFIEALGLEEVVLVIHDWGSALGFHWAKRNPERVKGIAFMEFIRPIPTWDEWPEFARETFQAFRTTDVGRKLIIDQNVFIEGTLPMGVVRPLTEVEMDHYREPFLNPVDREPLWRFPNELPIAGEPANIVALVEEYMDWLHQSPVPKLLFWGTPGVLIPPAEAARLAKSLPNCKAVDIGPGLNLLQEDNPDLIGSEIARWLSTLEISG

SEQ ID NO: 1261 - protein, 277 aa, Synthetic construct
MFHYVDVGPRDGTTVLFLHGNPTSSYVWRNIIPHVAPTHRCIAPDLIGMGKSDKPDLGYFFDDHVRFMDAFIEALGLEEVVLVIHDWGSALGFHWAKRNPERVKGIAFMEFIRPIPTWDEWPEFARETFQAFRTTDVGRKLIIDQNVFIEGTLPMGVVRPLTEVEMDHYREPFLNPVDREPLWRFPNELPIAGEPANIVALVEEYMDWLHQSPVPKLLFWGTPGVLIPPAEAARLAKSLPNCKAVDIGPGLNLLQEDNPDLIGSEIARWLSTLEISG

SEQ ID NO: 1262 - protein, 277 aa, Synthetic construct
MFHYVDVGPRDGTVVLFLHGNPTSSYVWRNIIPHVAPTHRCIAPDLIGMGKSDKPDLGYFFDDHVRFMDAFIEALGLEEVVLVIHDWGSALGFHWAKRNPERVKGIAFMEFIRPIPTWDEWPEFARETFQAFRTTDVGRKLIIDQNVFIEGTLPMGVVRPLTEVEMDHYREPFLNPVDREPLWRFPNELPIAGEPANIVALVEEYMDWLHQSPVPKLLFWGTPGVLIPPAEAARLAKSLPNCKAVDIGPGLNLLQEDNPDLIGSEIARWLSTLEISG

SEQ ID NO: 1263 - protein, 277 aa, Synthetic construct
MFHYVDVGPRDGTSVLFLHGNPTSSYVWRNIIPHVAPTHRCIAPDLIGMGKSDKPDLGYFFDDHVRFMDAFIEALGLEEVVLVIHDWGSALGFHWAKRNPERVKGIAFMEFIRPIPTWDEWPEFARETFQAFRTTDVGRKLIIDQNVFIEGTLPMGVVRPLTEVEMDHYREPFLNPVDREPLWRFPNELPIAGEPANIVALVEEYMDWLHQSPVPKLLFWGTPGVLIPPAEAARLAKSLPNCKAVDIGPGLNLLQEDNPDLIGSEIARWLSTLEISG

SEQ ID NO: 1264 - protein, 277 aa, Synthetic construct
MFHYVDVGPRDGTIVLFLHGNPTSSYVWRNIIPHVAPTHRCIAPDLIGMGKSDKPDLGYFFDDHVRFMDAFIEALGLEEVVLVIHDWGSALGFHWAKRNPERVKGIAFMEFIRPIPTWDEWPEFARETFQAFRTTDVGRKLIIDQNVFIEGTLPMGVVRPLTEVEMDHYREPFLNPVDREPLWRFPNELPIAGEPANIVALVEEYMDWLHQSPVPKLLFWGTPGVLIPPAEAARLAKSLPNCKAVDIGPGLNLLQEDNPDLIGSEIARWLSTLEISG

SEQ ID NO: 1265 - protein, 277 aa, Synthetic construct
MFHYVDVGPRDGTLVLFLHGNPTSSYVWRNIIPHVAPTHRCIAPDLIGMGKSDKPDLGYFFDDHVRFMDAFIEALGLEEVVLVIHDWGSALGFHWAKRNPERVKGIAFMEFIRPIPTWDEWPEFARETFQAFRTTDVGRKLIIDQNVFIEGTLPMGVVRPLTEVEMDHYREPFLNPVDREPLWRFPNELPIAGEPANIVALVEEYMDWLHQSPVPKLLFWGTPGVLIPPAEAARLAKSLPNCKAVDIGPGLNLLQEDNPDLIGSEIARWLSTLEISG

SEQ ID NO: 1266 - protein, 277 aa, Synthetic construct
MFHYVDVGPRDGTPILFLHGNPTSSYVWRNIIPHVAPTHRCIAPDLIGMGKSDKPDLGYFFDDHVRFMDAFIEALGLEEVVLVIHDWGSALGFHWAKRNPERVKGIAFMEFIRPIPTWDEWPEFARETFQAFRTTDVGRKLIIDQNVFIEGTLPMGVVRPLTEVEMDHYREPFLNPVDREPLWRFPNELPIAGEPANIVALVEEYMDWLHQSPVPKLLFWGTPGVLIPPAEAARLAKSLPNCKAVDIGPGLNLLQEDNPDLIGSEIARWLSTLEISG

SEQ ID NO: 1267 - protein, 277 aa, Synthetic construct
MFHYVDVGPRDGTPLLFLHGNPTSSYVWRNIIPHVAPTHRCIAPDLIGMGKSDKPDLGYFFDDHVRFMDAFIEALGLEEVVLVIHDWGSALGFHWAKRNPERVKGIAFMEFIRPIPTWDEWPEFARETFQAFRTTDVGRKLIIDQNVFIEGTLPMGVVRPLTEVEMDHYREPFLNPVDREPLWRFPNELPIAGEPANIVALVEEYMDWLHQSPVPKLLFWGTPGVLIPPAEAARLAKSLPNCKAVDIGPGLNLLQEDNPDLIGSEIARWLSTLEISG

SEQ ID NO: 1268 - protein, 277 aa, Synthetic construct
MFHYVDVGPRDGTPALFLHGNPTSSYVWRNIIPHVAPTHRCIAPDLIGMGKSDKPDLGYFFDDHVRFMDAFIEALGLEEVVLVIHDWGSALGFHWAKRNPERVKGIAFMEFIRPIPTWDEWPEFARETFQAFRTTDVGRKLIIDQNVFIEGTLPMGVVRPLTEVEMDHYREPFLNPVDREPLWRFPNELPIAGEPANIVALVEEYMDWLHQSPVPKLLFWGTPGVLIPPAEAARLAKSLPNCKAVDIGPGLNLLQEDNPDLIGSEIARWLSTLEISG

SEQ ID NO: 1269 - protein, 277 aa, Synthetic construct
MFHYVDVGPRDGTPMLFLHGNPTSSYVWRNIIPHVAPTHRCIAPDLIGMGKSDKPDLGYFFDDHVRFMDAFIEALGLEEVVLVIHDWGSALGFHWAKRNPERVKGIAFMEFIRPIPTWDEWPEFARETFQAFRTTDVGRKLIIDQNVFIEGTLPMGVVRPLTEVEMDHYREPFLNPVDREPLWRFPNELPIAGEPANIVALVEEYMDWLHQSPVPKLLFWGTPGVLIPPAEAARLAKSLPNCKAVDIGPGLNLLQEDNPDLIGSEIARWLSTLEISG

SEQ ID NO: 1270 - protein, 277 aa, Synthetic construct
MFHYVDVGPRDGTPTLFLHGNPTSSYVWRNIIPHVAPTHRCIAPDLIGMGKSDKPDLGYFFDDHVRFMDAFIEALGLEEVVLVIHDWGSALGFHWAKRNPERVKGIAFMEFIRPIPTWDEWPEFARETFQAFRTTDVGRKLIIDQNVFIEGTLPMGVVRPLTEVEMDHYREPFLNPVDREPLWRFPNELPIAGEPANIVALVEEYMDWLHQSPVPKLLFWGTPGVLIPPAEAARLAKSLPNCKAVDIGPGLNLLQEDNPDLIGSEIARWLSTLEISG

SEQ ID NO: 1271 - protein, 277 aa, Synthetic construct
MFHYVDVGPRDGTPFLFLHGNPTSSYVWRNIIPHVAPTHRCIAPDLIGMGKSDKPDLGYFFDDHVRFMDAFIEALGLEEVVLVIHDWGSALGFHWAKRNPERVKGIAFMEFIRPIPTWDEWPEFARETFQAFRTTDVGRKLIIDQNVFIEGTLPMGVVRPLTEVEMDHYREPFLNPVDREPLWRFPNELPIAGEPANIVALVEEYMDWLHQSPVPKLLFWGTPGVLIPPAEAARLAKSLPNCKAVDIGPGLNLLQEDNPDLIGSEIARWLSTLEISG

SEQ ID NO: 1272 - protein, 277 aa, Synthetic construct
MFHYVDVGPRDGTPVVFLHGNPTSSYVWRNIIPHVAPTHRCIAPDLIGMGKSDKPDLGYFFDDHVRFMDAFIEALGLEEVVLVIHDWGSALGFHWAKRNPERVKGIAFMEFIRPIPTWDEWPEFARETFQAFRTTDVGRKLIIDQNVFIEGTLPMGVVRPLTEVEMDHYREPFLNPVDREPLWRFPNELPIAGEPANIVALVEEYMDWLHQSPVPKLLFWGTPGVLIPPAEAARLAKSLPNCKAVDIGPGLNLLQEDNPDLIGSEIARWLSTLEISG

SEQ ID NO: 1273 - protein, 277 aa, Synthetic construct
MFHYVDVGPRDGTPVIFLHGNPTSSYVWRNIIPHVAPTHRCIAPDLIGMGKSDKPDLGYFFDDHVRFMDAFIEALGLEEVVLVIHDWGSALGFHWAKRNPERVKGIAFMEFIRPIPTWDEWPEFARETFQAFRTTDVGRKLIIDQNVFIEGTLPMGVVRPLTEVEMDHYREPFLNPVDREPLWRFPNELPIAGEPANIVALVEEYMDWLHQSPVPKLLFWGTPGVLIPPAEAARLAKSLPNCKAVDIGPGLNLLQEDNPDLIGSEIARWLSTLEISG

SEQ ID NO: 1274 - protein, 277 aa, Synthetic construct
MFHYVDVGPRDGTPVMFLHGNPTSSYVWRNIIPHVAPTHRCIAPDLIGMGKSDKPDLGYFFDDHVRFMDAFIEALGLEEVVLVIHDWGSALGFHWAKRNPERVKGIAFMEFIRPIPTWDEWPEFARETFQAFRTTDVGRKLIIDQNVFIEGTLPMGVVRPLTEVEMDHYREPFLNPVDREPLWRFPNELPIAGEPANIVALVEEYMDWLHQSPVPKLLFWGTPGVLIPPAEAARLAKSLPNCKAVDIGPGLNLLQEDNPDLIGSEIARWLSTLEISG

SEQ ID NO: 1275 - protein, 277 aa, Synthetic construct
MFHYVDVGPRDGTPVFFLHGNPTSSYVWRNIIPHVAPTHRCIAPDLIGMGKSDKPDLGYFFDDHVRFMDAFIEALGLEEVVLVIHDWGSALGFHWAKRNPERVKGIAFMEFIRPIPTWDEWPEFARETFQAFRTTDVGRKLIIDQNVFIEGTLPMGVVRPLTEVEMDHYREPFLNPVDREPLWRFPNELPIAGEPANIVALVEEYMDWLHQSPVPKLLFWGTPGVLIPPAEAARLAKSLPNCKAVDIGPGLNLLQEDNPDLIGSEIARWLSTLEISG

SEQ ID NO: 1276 - protein, 277 aa, Synthetic construct
MFHYVDVGPRDGTPVAFLHGNPTSSYVWRNIIPHVAPTHRCIAPDLIGMGKSDKPDLGYFFDDHVRFMDAFIEALGLEEVVLVIHDWGSALGFHWAKRNPERVKGIAFMEFIRPIPTWDEWPEFARETFQAFRTTDVGRKLIIDQNVFIEGTLPMGVVRPLTEVEMDHYREPFLNPVDREPLWRFPNELPIAGEPANIVALVEEYMDWLHQSPVPKLLFWGTPGVLIPPAEAARLAKSLPNCKAVDIGPGLNLLQEDNPDLIGSEIARWLSTLEISG

SEQ ID NO: 1277 - protein, 277 aa, Synthetic construct
MFHYVDVGPRDGTPVCFLHGNPTSSYVWRNIIPHVAPTHRCIAPDLIGMGKSDKPDLGYFFDDHVRFMDAFIEALGLEEVVLVIHDWGSALGFHWAKRNPERVKGIAFMEFIRPIPTWDEWPEFARETFQAFRTTDVGRKLIIDQNVFIEGTLPMGVVRPLTEVEMDHYREPFLNPVDREPLWRFPNELPIAGEPANIVALVEEYMDWLHQSPVPKLLFWGTPGVLIPPAEAARLAKSLPNCKAVDIGPGLNLLQEDNPDLIGSEIARWLSTLEISG

SEQ ID NO: 1278 - protein, 277 aa, Synthetic construct
MFHYVDVGPRDGTPVLLLHGNPTSSYVWRNIIPHVAPTHRCIAPDLIGMGKSDKPDLGYFFDDHVRFMDAFIEALGLEEVVLVIHDWGSALGFHWAKRNPERVKGIAFMEFIRPIPTWDEWPEFARETFQAFRTTDVGRKLIIDQNVFIEGTLPMGVVRPLTEVEMDHYREPFLNPVDREPLWRFPNELPIAGEPANIVALVEEYMDWLHQSPVPKLLFWGTPGVLIPPAEAARLAKSLPNCKAVDIGPGLNLLQEDNPDLIGSEIARWLSTLEISG

SEQ ID NO: 1279 - protein, 277 aa, Synthetic construct
MFHYVDVGPRDGTPVLMLHGNPTSSYVWRNIIPHVAPTHRCIAPDLIGMGKSDKPDLGYFFDDHVRFMDAFIEALGLEEVVLVIHDWGSALGFHWAKRNPERVKGIAFMEFIRPIPTWDEWPEFARETFQAFRTTDVGRKLIIDQNVFIEGTLPMGVVRPLTEVEMDHYREPFLNPVDREPLWRFPNELPIAGEPANIVALVEEYMDWLHQSPVPKLLFWGTPGVLIPPAEAARLAKSLPNCKAVDIGPGLNLLQEDNPDLIGSEIARWLSTLEISG

SEQ ID NO: 1280 - protein, 277 aa, Synthetic construct
MFHYVDVGPRDGTPVLYLHGNPTSSYVWRNIIPHVAPTHRCIAPDLIGMGKSDKPDLGYFFDDHVRFMDAFIEALGLEEVVLVIHDWGSALGFHWAKRNPERVKGIAFMEFIRPIPTWDEWPEFARETFQAFRTTDVGRKLIIDQNVFIEGTLPMGVVRPLTEVEMDHYREPFLNPVDREPLWRFPNELPIAGEPANIVALVEEYMDWLHQSPVPKLLFWGTPGVLIPPAEAARLAKSLPNCKAVDIGPGLNLLQEDNPDLIGSEIARWLSTLEISG

SEQ ID NO: 1281 - protein, 277 aa, Synthetic construct
MFHYVDVGPRDGTPVLCLHGNPTSSYVWRNIIPHVAPTHRCIAPDLIGMGKSDKPDLGYFFDDHVRFMDAFIEALGLEEVVLVIHDWGSALGFHWAKRNPERVKGIAFMEFIRPIPTWDEWPEFARETFQAFRTTDVGRKLIIDQNVFIEGTLPMGVVRPLTEVEMDHYREPFLNPVDREPLWRFPNELPIAGEPANIVALVEEYMDWLHQSPVPKLLFWGTPGVLIPPAEAARLAKSLPNCKAVDIGPGLNLLQEDNPDLIGSEIARWLSTLEISG

SEQ ID NO: 1282 - protein, 277 aa, Synthetic construct
MFHYVDVGPRDGTPVLWLHGNPTSSYVWRNIIPHVAPTHRCIAPDLIGMGKSDKPDLGYFFDDHVRFMDAFIEALGLEEVVLVIHDWGSALGFHWAKRNPERVKGIAFMEFIRPIPTWDEWPEFARETFQAFRTTDVGRKLIIDQNVFIEGTLPMGVVRPLTEVEMDHYREPFLNPVDREPLWRFPNELPIAGEPANIVALVEEYMDWLHQSPVPKLLFWGTPGVLIPPAEAARLAKSLPNCKAVDIGPGLNLLQEDNPDLIGSEIARWLSTLEISG

SEQ ID NO: 1283 - protein, 277 aa, Synthetic construct
MFHYVDVGPRDGTPVLILHGNPTSSYVWRNIIPHVAPTHRCIAPDLIGMGKSDKPDLGYFFDDHVRFMDAFIEALGLEEVVLVIHDWGSALGFHWAKRNPERVKGIAFMEFIRPIPTWDEWPEFARETFQAFRTTDVGRKLIIDQNVFIEGTLPMGVVRPLTEVEMDHYREPFLNPVDREPLWRFPNELPIAGEPANIVALVEEYMDWLHQSPVPKLLFWGTPGVLIPPAEAARLAKSLPNCKAVDIGPGLNLLQEDNPDLIGSEIARWLSTLEISG

SEQ ID NO: 1284 - protein, 277 aa, Synthetic construct
MFHYVDVGPRDGTPVLFVHGNPTSSYVWRNIIPHVAPTHRCIAPDLIGMGKSDKPDLGYFFDDHVRFMDAFIEALGLEEVVLVIHDWGSALGFHWAKRNPERVKGIAFMEFIRPIPTWDEWPEFARETFQAFRTTDVGRKLIIDQNVFIEGTLPMGVVRPLTEVEMDHYREPFLNPVDREPLWRFPNELPIAGEPANIVALVEEYMDWLHQSPVPKLLFWGTPGVLIPPAEAARLAKSLPNCKAVDIGPGLNLLQEDNPDLIGSEIARWLSTLEISG

SEQ ID NO: 1285 - protein, 277 aa, Synthetic construct
MFHYVDVGPRDGTPVLFMHGNPTSSYVWRNIIPHVAPTHRCIAPDLIGMGKSDKPDLGYFFDDHVRFMDAFIEALGLEEVVLVIHDWGSALGFHWAKRNPERVKGIAFMEFIRPIPTWDEWPEFARETFQAFRTTDVGRKLIIDQNVFIEGTLPMGVVRPLTEVEMDHYREPFLNPVDREPLWRFPNELPIAGEPANIVALVEEYMDWLHQSPVPKLLFWGTPGVLIPPAEAARLAKSLPNCKAVDIGPGLNLLQEDNPDLIGSEIARWLSTLEISG

SEQ ID NO: 1286 - protein, 277 aa, Synthetic construct
MFHYVDVGPRDGTPVLFIHGNPTSSYVWRNIIPHVAPTHRCIAPDLIGMGKSDKPDLGYFFDDHVRFMDAFIEALGLEEVVLVIHDWGSALGFHWAKRNPERVKGIAFMEFIRPIPTWDEWPEFARETFQAFRTTDVGRKLIIDQNVFIEGTLPMGVVRPLTEVEMDHYREPFLNPVDREPLWRFPNELPIAGEPANIVALVEEYMDWLHQSPVPKLLFWGTPGVLIPPAEAARLAKSLPNCKAVDIGPGLNLLQEDNPDLIGSEIARWLSTLEISG

SEQ ID NO: 1287 - protein, 277 aa, Synthetic construct
MFHYVDVGPRDGTPVLFFHGNPTSSYVWRNIIPHVAPTHRCIAPDLIGMGKSDKPDLGYFFDDHVRFMDAFIEALGLEEVVLVIHDWGSALGFHWAKRNPERVKGIAFMEFIRPIPTWDEWPEFARETFQAFRTTDVGRKLIIDQNVFIEGTLPMGVVRPLTEVEMDHYREPFLNPVDREPLWRFPNELPIAGEPANIVALVEEYMDWLHQSPVPKLLFWGTPGVLIPPAEAARLAKSLPNCKAVDIGPGLNLLQEDNPDLIGSEIARWLSTLEISG

SEQ ID NO: 1288 - protein, 277 aa, Synthetic construct
MFHYVDVGPRDGTPVLFQHGNPTSSYVWRNIIPHVAPTHRCIAPDLIGMGKSDKPDLGYFFDDHVRFMDAFIEALGLEEVVLVIHDWGSALGFHWAKRNPERVKGIAFMEFIRPIPTWDEWPEFARETFQAFRTTDVGRKLIIDQNVFIEGTLPMGVVRPLTEVEMDHYREPFLNPVDREPLWRFPNELPIAGEPANIVALVEEYMDWLHQSPVPKLLFWGTPGVLIPPAEAARLAKSLPNCKAVDIGPGLNLLQEDNPDLIGSEIARWLSTLEISG

SEQ ID NO: 1289 - protein, 277 aa, Synthetic construct
MFHYVDVGPRDGTPVLFCHGNPTSSYVWRNIIPHVAPTHRCIAPDLIGMGKSDKPDLGYFFDDHVRFMDAFIEALGLEEVVLVIHDWGSALGFHWAKRNPERVKGIAFMEFIRPIPTWDEWPEFARETFQAFRTTDVGRKLIIDQNVFIEGTLPMGVVRPLTEVEMDHYREPFLNPVDREPLWRFPNELPIAGEPANIVALVEEYMDWLHQSPVPKLLFWGTPGVLIPPAEAARLAKSLPNCKAVDIGPGLNLLQEDNPDLIGSEIARWLSTLEISG

SEQ ID NO: 1290 - protein, 277 aa, Synthetic construct
MFHYVDVGPRDGTPVLFLNGNPTSSYVWRNIIPHVAPTHRCIAPDLIGMGKSDKPDLGYFFDDHVRFMDAFIEALGLEEVVLVIHDWGSALGFHWAKRNPERVKGIAFMEFIRPIPTWDEWPEFARETFQAFRTTDVGRKLIIDQNVFIEGTLPMGVVRPLTEVEMDHYREPFLNPVDREPLWRFPNELPIAGEPANIVALVEEYMDWLHQSPVPKLLFWGTPGVLIPPAEAARLAKSLPNCKAVDIGPGLNLLQEDNPDLIGSEIARWLSTLEISG

SEQ ID NO: 1291 - protein, 277 aa, Synthetic construct
MFHYVDVGPRDGTPVLFLQGNPTSSYVWRNIIPHVAPTHRCIAPDLIGMGKSDKPDLGYFFDDHVRFMDAFIEALGLEEVVLVIHDWGSALGFHWAKRNPERVKGIAFMEFIRPIPTWDEWPEFARETFQAFRTTDVGRKLIIDQNVFIEGTLPMGVVRPLTEVEMDHYREPFLNPVDREPLWRFPNELPIAGEPANIVALVEEYMDWLHQSPVPKLLFWGTPGVLIPPAEAARLAKSLPNCKAVDIGPGLNLLQEDNPDLIGSEIARWLSTLEISG

SEQ ID NO: 1292 - protein, 277 aa, Synthetic construct
MFHYVDVGPRDGTPVLFLSGNPTSSYVWRNIIPHVAPTHRCIAPDLIGMGKSDKPDLGYFFDDHVRFMDAFIEALGLEEVVLVIHDWGSALGFHWAKRNPERVKGIAFMEFIRPIPTWDEWPEFARETFQAFRTTDVGRKLIIDQNVFIEGTLPMGVVRPLTEVEMDHYREPFLNPVDREPLWRFPNELPIAGEPANIVALVEEYMDWLHQSPVPKLLFWGTPGVLIPPAEAARLAKSLPNCKAVDIGPGLNLLQEDNPDLIGSEIARWLSTLEISG

SEQ ID NO: 1293 - protein, 277 aa, Synthetic construct
MFHYVDVGPRDGTPVLFLPGNPTSSYVWRNIIPHVAPTHRCIAPDLIGMGKSDKPDLGYFFDDHVRFMDAFIEALGLEEVVLVIHDWGSALGFHWAKRNPERVKGIAFMEFIRPIPTWDEWPEFARETFQAFRTTDVGRKLIIDQNVFIEGTLPMGVVRPLTEVEMDHYREPFLNPVDREPLWRFPNELPIAGEPANIVALVEEYMDWLHQSPVPKLLFWGTPGVLIPPAEAARLAKSLPNCKAVDIGPGLNLLQEDNPDLIGSEIARWLSTLEISG

SEQ ID NO: 1294 - protein, 277 aa, Synthetic construct
MFHYVDVGPRDGTPVLFLYGNPTSSYVWRNIIPHVAPTHRCIAPDLIGMGKSDKPDLGYFFDDHVRFMDAFIEALGLEEVVLVIHDWGSALGFHWAKRNPERVKGIAFMEFIRPIPTWDEWPEFARETFQAFRTTDVGRKLIIDQNVFIEGTLPMGVVRPLTEVEMDHYREPFLNPVDREPLWRFPNELPIAGEPANIVALVEEYMDWLHQSPVPKLLFWGTPGVLIPPAEAARLAKSLPNCKAVDIGPGLNLLQEDNPDLIGSEIARWLSTLEISG

SEQ ID NO: 1295 - protein, 277 aa, Synthetic construct
MFHYVDVGPRDGTPVLFLAGNPTSSYVWRNIIPHVAPTHRCIAPDLIGMGKSDKPDLGYFFDDHVRFMDAFIEALGLEEVVLVIHDWGSALGFHWAKRNPERVKGIAFMEFIRPIPTWDEWPEFARETFQAFRTTDVGRKLIIDQNVFIEGTLPMGVVRPLTEVEMDHYREPFLNPVDREPLWRFPNELPIAGEPANIVALVEEYMDWLHQSPVPKLLFWGTPGVLIPPAEAARLAKSLPNCKAVDIGPGLNLLQEDNPDLIGSEIARWLSTLEISG

SEQ ID NO: 1296 - protein, 277 aa, Synthetic construct
MFHYVDVGPRDGTPVLFLHANPTSSYVWRNIIPHVAPTHRCIAPDLIGMGKSDKPDLGYFFDDHVRFMDAFIEALGLEEVVLVIHDWGSALGFHWAKRNPERVKGIAFMEFIRPIPTWDEWPEFARETFQAFRTTDVGRKLIIDQNVFIEGTLPMGVVRPLTEVEMDHYREPFLNPVDREPLWRFPNELPIAGEPANIVALVEEYMDWLHQSPVPKLLFWGTPGVLIPPAEAARLAKSLPNCKAVDIGPGLNLLQEDNPDLIGSEIARWLSTLEISG

SEQ ID NO: 1297 - protein, 277 aa, Synthetic construct
MFHYVDVGPRDGTPVLFLHSNPTSSYVWRNIIPHVAPTHRCIAPDLIGMGKSDKPDLGYFFDDHVRFMDAFIEALGLEEVVLVIHDWGSALGFHWAKRNPERVKGIAFMEFIRPIPTWDEWPEFARETFQAFRTTDVGRKLIIDQNVFIEGTLPMGVVRPLTEVEMDHYREPFLNPVDREPLWRFPNELPIAGEPANIVALVEEYMDWLHQSPVPKLLFWGTPGVLIPPAEAARLAKSLPNCKAVDIGPGLNLLQEDNPDLIGSEIARWLSTLEISG

SEQ ID NO: 1298 - protein, 277 aa, Synthetic construct
MFHYVDVGPRDGTPVLFLHCNPTSSYVWRNIIPHVAPTHRCIAPDLIGMGKSDKPDLGYFFDDHVRFMDAFIEALGLEEVVLVIHDWGSALGFHWAKRNPERVKGIAFMEFIRPIPTWDEWPEFARETFQAFRTTDVGRKLIIDQNVFIEGTLPMGVVRPLTEVEMDHYREPFLNPVDREPLWRFPNELPIAGEPANIVALVEEYMDWLHQSPVPKLLFWGTPGVLIPPAEAARLAKSLPNCKAVDIGPGLNLLQEDNPDLIGSEIARWLSTLEISG

SEQ ID NO: 1299 - protein, 277 aa, Synthetic construct
MFHYVDVGPRDGTPVLFLHDNPTSSYVWRNIIPHVAPTHRCIAPDLIGMGKSDKPDLGYFFDDHVRFMDAFIEALGLEEVVLVIHDWGSALGFHWAKRNPERVKGIAFMEFIRPIPTWDEWPEFARETFQAFRTTDVGRKLIIDQNVFIEGTLPMGVVRPLTEVEMDHYREPFLNPVDREPLWRFPNELPIAGEPANIVALVEEYMDWLHQSPVPKLLFWGTPGVLIPPAEAARLAKSLPNCKAVDIGPGLNLLQEDNPDLIGSEIARWLSTLEISG

SEQ ID NO: 1300 - protein, 277 aa, Synthetic construct
MFHYVDVGPRDGTPVLFLHPNPTSSYVWRNIIPHVAPTHRCIAPDLIGMGKSDKPDLGYFFDDHVRFMDAFIEALGLEEVVLVIHDWGSALGFHWAKRNPERVKGIAFMEFIRPIPTWDEWPEFARETFQAFRTTDVGRKLIIDQNVFIEGTLPMGVVRPLTEVEMDHYREPFLNPVDREPLWRFPNELPIAGEPANIVALVEEYMDWLHQSPVPKLLFWGTPGVLIPPAEAARLAKSLPNCKAVDIGPGLNLLQEDNPDLIGSEIARWLSTLEISG

SEQ ID NO: 1301 - protein, 277 aa, Synthetic construct
MFHYVDVGPRDGTPVLFLHVNPTSSYVWRNIIPHVAPTHRCIAPDLIGMGKSDKPDLGYFFDDHVRFMDAFIEALGLEEVVLVIHDWGSALGFHWAKRNPERVKGIAFMEFIRPIPTWDEWPEFARETFQAFRTTDVGRKLIIDQNVFIEGTLPMGVVRPLTEVEMDHYREPFLNPVDREPLWRFPNELPIAGEPANIVALVEEYMDWLHQSPVPKLLFWGTPGVLIPPAEAARLAKSLPNCKAVDIGPGLNLLQEDNPDLIGSEIARWLSTLEISG

SEQ ID NO: 1302 - protein, 277 aa, Synthetic construct
MFHYVDVGPRDGTPVLFLHGTPTSSYVWRNIIPHVAPTHRCIAPDLIGMGKSDKPDLGYFFDDHVRFMDAFIEALGLEEVVLVIHDWGSALGFHWAKRNPERVKGIAFMEFIRPIPTWDEWPEFARETFQAFRTTDVGRKLIIDQNVFIEGTLPMGVVRPLTEVEMDHYREPFLNPVDREPLWRFPNELPIAGEPANIVALVEEYMDWLHQSPVPKLLFWGTPGVLIPPAEAARLAKSLPNCKAVDIGPGLNLLQEDNPDLIGSEIARWLSTLEISG

SEQ ID NO: 1303 - protein, 277 aa, Synthetic construct
MFHYVDVGPRDGTPVLFLHGSPTSSYVWRNIIPHVAPTHRCIAPDLIGMGKSDKPDLGYFFDDHVRFMDAFIEALGLEEVVLVIHDWGSALGFHWAKRNPERVKGIAFMEFIRPIPTWDEWPEFARETFQAFRTTDVGRKLIIDQNVFIEGTLPMGVVRPLTEVEMDHYREPFLNPVDREPLWRFPNELPIAGEPANIVALVEEYMDWLHQSPVPKLLFWGTPGVLIPPAEAARLAKSLPNCKAVDIGPGLNLLQEDNPDLIGSEIARWLSTLEISG

SEQ ID NO: 1304 - protein, 277 aa, Synthetic construct
MFHYVDVGPRDGTPVLFLHGVPTSSYVWRNIIPHVAPTHRCIAPDLIGMGKSDKPDLGYFFDDHVRFMDAFIEALGLEEVVLVIHDWGSALGFHWAKRNPERVKGIAFMEFIRPIPTWDEWPEFARETFQAFRTTDVGRKLIIDQNVFIEGTLPMGVVRPLTEVEMDHYREPFLNPVDREPLWRFPNELPIAGEPANIVALVEEYMDWLHQSPVPKLLFWGTPGVLIPPAEAARLAKSLPNCKAVDIGPGLNLLQEDNPDLIGSEIARWLSTLEISG

SEQ ID NO: 1305 - protein, 277 aa, Synthetic construct
MFHYVDVGPRDGTPVLFLHGQPTSSYVWRNIIPHVAPTHRCIAPDLIGMGKSDKPDLGYFFDDHVRFMDAFIEALGLEEVVLVIHDWGSALGFHWAKRNPERVKGIAFMEFIRPIPTWDEWPEFARETFQAFRTTDVGRKLIIDQNVFIEGTLPMGVVRPLTEVEMDHYREPFLNPVDREPLWRFPNELPIAGEPANIVALVEEYMDWLHQSPVPKLLFWGTPGVLIPPAEAARLAKSLPNCKAVDIGPGLNLLQEDNPDLIGSEIARWLSTLEISG

SEQ ID NO: 1306 - protein, 277 aa, Synthetic construct
MFHYVDVGPRDGTPVLFLHGAPTSSYVWRNIIPHVAPTHRCIAPDLIGMGKSDKPDLGYFFDDHVRFMDAFIEALGLEEVVLVIHDWGSALGFHWAKRNPERVKGIAFMEFIRPIPTWDEWPEFARETFQAFRTTDVGRKLIIDQNVFIEGTLPMGVVRPLTEVEMDHYREPFLNPVDREPLWRFPNELPIAGEPANIVALVEEYMDWLHQSPVPKLLFWGTPGVLIPPAEAARLAKSLPNCKAVDIGPGLNLLQEDNPDLIGSEIARWLSTLEISG

SEQ ID NO: 1307 - protein, 277 aa, Synthetic construct
MFHYVDVGPRDGTPVLFLHGIPTSSYVWRNIIPHVAPTHRCIAPDLIGMGKSDKPDLGYFFDDHVRFMDAFIEALGLEEVVLVIHDWGSALGFHWAKRNPERVKGIAFMEFIRPIPTWDEWPEFARETFQAFRTTDVGRKLIIDQNVFIEGTLPMGVVRPLTEVEMDHYREPFLNPVDREPLWRFPNELPIAGEPANIVALVEEYMDWLHQSPVPKLLFWGTPGVLIPPAEAARLAKSLPNCKAVDIGPGLNLLQEDNPDLIGSEIARWLSTLEISG

SEQ ID NO: 1308 - protein, 277 aa, Synthetic construct
MFHYVDVGPRDGTPVLFLHGNATSSYVWRNIIPHVAPTHRCIAPDLIGMGKSDKPDLGYFFDDHVRFMDAFIEALGLEEVVLVIHDWGSALGFHWAKRNPERVKGIAFMEFIRPIPTWDEWPEFARETFQAFRTTDVGRKLIIDQNVFIEGTLPMGVVRPLTEVEMDHYREPFLNPVDREPLWRFPNELPIAGEPANIVALVEEYMDWLHQSPVPKLLFWGTPGVLIPPAEAARLAKSLPNCKAVDIGPGLNLLQEDNPDLIGSEIARWLSTLEISG

SEQ ID NO: 1309 - protein, 277 aa, Synthetic construct
MFHYVDVGPRDGTPVLFLHGNSTSSYVWRNIIPHVAPTHRCIAPDLIGMGKSDKPDLGYFFDDHVRFMDAFIEALGLEEVVLVIHDWGSALGFHWAKRNPERVKGIAFMEFIRPIPTWDEWPEFARETFQAFRTTDVGRKLIIDQNVFIEGTLPMGVVRPLTEVEMDHYREPFLNPVDREPLWRFPNELPIAGEPANIVALVEEYMDWLHQSPVPKLLFWGTPGVLIPPAEAARLAKSLPNCKAVDIGPGLNLLQEDNPDLIGSEIARWLSTLEISG

SEQ ID NO: 1310 - protein, 277 aa, Synthetic construct
MFHYVDVGPRDGTPVLFLHGNLTSSYVWRNIIPHVAPTHRCIAPDLIGMGKSDKPDLGYFFDDHVRFMDAFIEALGLEEVVLVIHDWGSALGFHWAKRNPERVKGIAFMEFIRPIPTWDEWPEFARETFQAFRTTDVGRKLIIDQNVFIEGTLPMGVVRPLTEVEMDHYREPFLNPVDREPLWRFPNELPIAGEPANIVALVEEYMDWLHQSPVPKLLFWGTPGVLIPPAEAARLAKSLPNCKAVDIGPGLNLLQEDNPDLIGSEIARWLSTLEISG

SEQ ID NO: 1311 - protein, 277 aa, Synthetic construct
MFHYVDVGPRDGTPVLFLHGNTTSSYVWRNIIPHVAPTHRCIAPDLIGMGKSDKPDLGYFFDDHVRFMDAFIEALGLEEVVLVIHDWGSALGFHWAKRNPERVKGIAFMEFIRPIPTWDEWPEFARETFQAFRTTDVGRKLIIDQNVFIEGTLPMGVVRPLTEVEMDHYREPFLNPVDREPLWRFPNELPIAGEPANIVALVEEYMDWLHQSPVPKLLFWGTPGVLIPPAEAARLAKSLPNCKAVDIGPGLNLLQEDNPDLIGSEIARWLSTLEISG

SEQ ID NO: 1312 - protein, 277 aa, Synthetic construct
MFHYVDVGPRDGTPVLFLHGNVTSSYVWRNIIPHVAPTHRCIAPDLIGMGKSDKPDLGYFFDDHVRFMDAFIEALGLEEVVLVIHDWGSALGFHWAKRNPERVKGIAFMEFIRPIPTWDEWPEFARETFQAFRTTDVGRKLIIDQNVFIEGTLPMGVVRPLTEVEMDHYREPFLNPVDREPLWRFPNELPIAGEPANIVALVEEYMDWLHQSPVPKLLFWGTPGVLIPPAEAARLAKSLPNCKAVDIGPGLNLLQEDNPDLIGSEIARWLSTLEISG

SEQ ID NO: 1313 - protein, 277 aa, Synthetic construct
MFHYVDVGPRDGTPVLFLHGNGTSSYVWRNIIPHVAPTHRCIAPDLIGMGKSDKPDLGYFFDDHVRFMDAFIEALGLEEVVLVIHDWGSALGFHWAKRNPERVKGIAFMEFIRPIPTWDEWPEFARETFQAFRTTDVGRKLIIDQNVFIEGTLPMGVVRPLTEVEMDHYREPFLNPVDREPLWRFPNELPIAGEPANIVALVEEYMDWLHQSPVPKLLFWGTPGVLIPPAEAARLAKSLPNCKAVDIGPGLNLLQEDNPDLIGSEIARWLSTLEISG

SEQ ID NO: 1314 - protein, 277 aa, Synthetic construct
MFHYVDVGPRDGTPVLFLHGNPASSYVWRNIIPHVAPTHRCIAPDLIGMGKSDKPDLGYFFDDHVRFMDAFIEALGLEEVVLVIHDWGSALGFHWAKRNPERVKGIAFMEFIRPIPTWDEWPEFARETFQAFRTTDVGRKLIIDQNVFIEGTLPMGVVRPLTEVEMDHYREPFLNPVDREPLWRFPNELPIAGEPANIVALVEEYMDWLHQSPVPKLLFWGTPGVLIPPAEAARLAKSLPNCKAVDIGPGLNLLQEDNPDLIGSEIARWLSTLEISG

SEQ ID NO: 1315 - protein, 277 aa, Synthetic construct
MFHYVDVGPRDGTPVLFLHGNPSSSYVWRNIIPHVAPTHRCIAPDLIGMGKSDKPDLGYFFDDHVRFMDAFIEALGLEEVVLVIHDWGSALGFHWAKRNPERVKGIAFMEFIRPIPTWDEWPEFARETFQAFRTTDVGRKLIIDQNVFIEGTLPMGVVRPLTEVEMDHYREPFLNPVDREPLWRFPNELPIAGEPANIVALVEEYMDWLHQSPVPKLLFWGTPGVLIPPAEAARLAKSLPNCKAVDIGPGLNLLQEDNPDLIGSEIARWLSTLEISG

SEQ ID NO: 1316 - protein, 277 aa, Synthetic construct
MFHYVDVGPRDGTPVLFLHGNPVSSYVWRNIIPHVAPTHRCIAPDLIGMGKSDKPDLGYFFDDHVRFMDAFIEALGLEEVVLVIHDWGSALGFHWAKRNPERVKGIAFMEFIRPIPTWDEWPEFARETFQAFRTTDVGRKLIIDQNVFIEGTLPMGVVRPLTEVEMDHYREPFLNPVDREPLWRFPNELPIAGEPANIVALVEEYMDWLHQSPVPKLLFWGTPGVLIPPAEAARLAKSLPNCKAVDIGPGLNLLQEDNPDLIGSEIARWLSTLEISG

SEQ ID NO: 1317 - protein, 277 aa, Synthetic construct
MFHYVDVGPRDGTPVLFLHGNPGSSYVWRNIIPHVAPTHRCIAPDLIGMGKSDKPDLGYFFDDHVRFMDAFIEALGLEEVVLVIHDWGSALGFHWAKRNPERVKGIAFMEFIRPIPTWDEWPEFARETFQAFRTTDVGRKLIIDQNVFIEGTLPMGVVRPLTEVEMDHYREPFLNPVDREPLWRFPNELPIAGEPANIVALVEEYMDWLHQSPVPKLLFWGTPGVLIPPAEAARLAKSLPNCKAVDIGPGLNLLQEDNPDLIGSEIARWLSTLEISG

SEQ ID NO: 1318 - protein, 277 aa, Synthetic construct
MFHYVDVGPRDGTPVLFLHGNPNSSYVWRNIIPHVAPTHRCIAPDLIGMGKSDKPDLGYFFDDHVRFMDAFIEALGLEEVVLVIHDWGSALGFHWAKRNPERVKGIAFMEFIRPIPTWDEWPEFARETFQAFRTTDVGRKLIIDQNVFIEGTLPMGVVRPLTEVEMDHYREPFLNPVDREPLWRFPNELPIAGEPANIVALVEEYMDWLHQSPVPKLLFWGTPGVLIPPAEAARLAKSLPNCKAVDIGPGLNLLQEDNPDLIGSEIARWLSTLEISG

SEQ ID NO: 1319 - protein, 277 aa, Synthetic construct
MFHYVDVGPRDGTPVLFLHGNPMSSYVWRNIIPHVAPTHRCIAPDLIGMGKSDKPDLGYFFDDHVRFMDAFIEALGLEEVVLVIHDWGSALGFHWAKRNPERVKGIAFMEFIRPIPTWDEWPEFARETFQAFRTTDVGRKLIIDQNVFIEGTLPMGVVRPLTEVEMDHYREPFLNPVDREPLWRFPNELPIAGEPANIVALVEEYMDWLHQSPVPKLLFWGTPGVLIPPAEAARLAKSLPNCKAVDIGPGLNLLQEDNPDLIGSEIARWLSTLEISG

SEQ ID NO: 1320 - protein, 277 aa, Synthetic construct
MFHYVDVGPRDGTPVLFLHGNPTASYVWRNIIPHVAPTHRCIAPDLIGMGKSDKPDLGYFFDDHVRFMDAFIEALGLEEVVLVIHDWGSALGFHWAKRNPERVKGIAFMEFIRPIPTWDEWPEFARETFQAFRTTDVGRKLIIDQNVFIEGTLPMGVVRPLTEVEMDHYREPFLNPVDREPLWRFPNELPIAGEPANIVALVEEYMDWLHQSPVPKLLFWGTPGVLIPPAEAARLAKSLPNCKAVDIGPGLNLLQEDNPDLIGSEIARWLSTLEISG

SEQ ID NO: 1321 - protein, 277 aa, Synthetic construct
MFHYVDVGPRDGTPVLFLHGNPTTSYVWRNIIPHVAPTHRCIAPDLIGMGKSDKPDLGYFFDDHVRFMDAFIEALGLEEVVLVIHDWGSALGFHWAKRNPERVKGIAFMEFIRPIPTWDEWPEFARETFQAFRTTDVGRKLIIDQNVFIEGTLPMGVVRPLTEVEMDHYREPFLNPVDREPLWRFPNELPIAGEPANIVALVEEYMDWLHQSPVPKLLFWGTPGVLIPPAEAARLAKSLPNCKAVDIGPGLNLLQEDNPDLIGSEIARWLSTLEISG

SEQ ID NO: 1322 - protein, 277 aa, Synthetic construct
MFHYVDVGPRDGTPVLFLHGNPTWSYVWRNIIPHVAPTHRCIAPDLIGMGKSDKPDLGYFFDDHVRFMDAFIEALGLEEVVLVIHDWGSALGFHWAKRNPERVKGIAFMEFIRPIPTWDEWPEFARETFQAFRTTDVGRKLIIDQNVFIEGTLPMGVVRPLTEVEMDHYREPFLNPVDREPLWRFPNELPIAGEPANIVALVEEYMDWLHQSPVPKLLFWGTPGVLIPPAEAARLAKSLPNCKAVDIGPGLNLLQEDNPDLIGSEIARWLSTLEISG

SEQ ID NO: 1323 - protein, 277 aa, Synthetic construct
MFHYVDVGPRDGTPVLFLHGNPTCSYVWRNIIPHVAPTHRCIAPDLIGMGKSDKPDLGYFFDDHVRFMDAFIEALGLEEVVLVIHDWGSALGFHWAKRNPERVKGIAFMEFIRPIPTWDEWPEFARETFQAFRTTDVGRKLIIDQNVFIEGTLPMGVVRPLTEVEMDHYREPFLNPVDREPLWRFPNELPIAGEPANIVALVEEYMDWLHQSPVPKLLFWGTPGVLIPPAEAARLAKSLPNCKAVDIGPGLNLLQEDNPDLIGSEIARWLSTLEISG

SEQ ID NO: 1324 - protein, 277 aa, Synthetic construct
MFHYVDVGPRDGTPVLFLHGNPTGSYVWRNIIPHVAPTHRCIAPDLIGMGKSDKPDLGYFFDDHVRFMDAFIEALGLEEVVLVIHDWGSALGFHWAKRNPERVKGIAFMEFIRPIPTWDEWPEFARETFQAFRTTDVGRKLIIDQNVFIEGTLPMGVVRPLTEVEMDHYREPFLNPVDREPLWRFPNELPIAGEPANIVALVEEYMDWLHQSPVPKLLFWGTPGVLIPPAEAARLAKSLPNCKAVDIGPGLNLLQEDNPDLIGSEIARWLSTLEISG

SEQ ID NO: 1325 - protein, 277 aa, Synthetic construct
MFHYVDVGPRDGTPVLFLHGNPTNSYVWRNIIPHVAPTHRCIAPDLIGMGKSDKPDLGYFFDDHVRFMDAFIEALGLEEVVLVIHDWGSALGFHWAKRNPERVKGIAFMEFIRPIPTWDEWPEFARETFQAFRTTDVGRKLIIDQNVFIEGTLPMGVVRPLTEVEMDHYREPFLNPVDREPLWRFPNELPIAGEPANIVALVEEYMDWLHQSPVPKLLFWGTPGVLIPPAEAARLAKSLPNCKAVDIGPGLNLLQEDNPDLIGSEIARWLSTLEISG

SEQ ID NO: 1326 - protein, 277 aa, Synthetic construct
MFHYVDVGPRDGTPVLFLHGNPTSAYVWRNIIPHVAPTHRCIAPDLIGMGKSDKPDLGYFFDDHVRFMDAFIEALGLEEVVLVIHDWGSALGFHWAKRNPERVKGIAFMEFIRPIPTWDEWPEFARETFQAFRTTDVGRKLIIDQNVFIEGTLPMGVVRPLTEVEMDHYREPFLNPVDREPLWRFPNELPIAGEPANIVALVEEYMDWLHQSPVPKLLFWGTPGVLIPPAEAARLAKSLPNCKAVDIGPGLNLLQEDNPDLIGSEIARWLSTLEISG

SEQ ID NO: 1327 - protein, 277 aa, Synthetic construct
MFHYVDVGPRDGTPVLFLHGNPTSGYVWRNIIPHVAPTHRCIAPDLIGMGKSDKPDLGYFFDDHVRFMDAFIEALGLEEVVLVIHDWGSALGFHWAKRNPERVKGIAFMEFIRPIPTWDEWPEFARETFQAFRTTDVGRKLIIDQNVFIEGTLPMGVVRPLTEVEMDHYREPFLNPVDREPLWRFPNELPIAGEPANIVALVEEYMDWLHQSPVPKLLFWGTPGVLIPPAEAARLAKSLPNCKAVDIGPGLNLLQEDNPDLIGSEIARWLSTLEISG

SEQ ID NO: 1328 - protein, 277 aa, Synthetic construct
MFHYVDVGPRDGTPVLFLHGNPTSTYVWRNIIPHVAPTHRCIAPDLIGMGKSDKPDLGYFFDDHVRFMDAFIEALGLEEVVLVIHDWGSALGFHWAKRNPERVKGIAFMEFIRPIPTWDEWPEFARETFQAFRTTDVGRKLIIDQNVFIEGTLPMGVVRPLTEVEMDHYREPFLNPVDREPLWRFPNELPIAGEPANIVALVEEYMDWLHQSPVPKLLFWGTPGVLIPPAEAARLAKSLPNCKAVDIGPGLNLLQEDNPDLIGSEIARWLSTLEISG

SEQ ID NO: 1329 - protein, 277 aa, Synthetic construct
MFHYVDVGPRDGTPVLFLHGNPTSCYVWRNIIPHVAPTHRCIAPDLIGMGKSDKPDLGYFFDDHVRFMDAFIEALGLEEVVLVIHDWGSALGFHWAKRNPERVKGIAFMEFIRPIPTWDEWPEFARETFQAFRTTDVGRKLIIDQNVFIEGTLPMGVVRPLTEVEMDHYREPFLNPVDREPLWRFPNELPIAGEPANIVALVEEYMDWLHQSPVPKLLFWGTPGVLIPPAEAARLAKSLPNCKAVDIGPGLNLLQEDNPDLIGSEIARWLSTLEISG

SEQ ID NO: 1330 - protein, 277 aa, Synthetic construct
MFHYVDVGPRDGTPVLFLHGNPTSNYVWRNIIPHVAPTHRCIAPDLIGMGKSDKPDLGYFFDDHVRFMDAFIEALGLEEVVLVIHDWGSALGFHWAKRNPERVKGIAFMEFIRPIPTWDEWPEFARETFQAFRTTDVGRKLIIDQNVFIEGTLPMGVVRPLTEVEMDHYREPFLNPVDREPLWRFPNELPIAGEPANIVALVEEYMDWLHQSPVPKLLFWGTPGVLIPPAEAARLAKSLPNCKAVDIGPGLNLLQEDNPDLIGSEIARWLSTLEISG

SEQ ID NO: 1331 - protein, 277 aa, Synthetic construct
MFHYVDVGPRDGTPVLFLHGNPTSPYVWRNIIPHVAPTHRCIAPDLIGMGKSDKPDLGYFFDDHVRFMDAFIEALGLEEVVLVIHDWGSALGFHWAKRNPERVKGIAFMEFIRPIPTWDEWPEFARETFQAFRTTDVGRKLIIDQNVFIEGTLPMGVVRPLTEVEMDHYREPFLNPVDREPLWRFPNELPIAGEPANIVALVEEYMDWLHQSPVPKLLFWGTPGVLIPPAEAARLAKSLPNCKAVDIGPGLNLLQEDNPDLIGSEIARWLSTLEISG

SEQ ID NO: 1332 - protein, 277 aa, Synthetic construct
MFHYVDVGPRDGTPVLFLHGNPTSSFVWRNIIPHVAPTHRCIAPDLIGMGKSDKPDLGYFFDDHVRFMDAFIEALGLEEVVLVIHDWGSALGFHWAKRNPERVKGIAFMEFIRPIPTWDEWPEFARETFQAFRTTDVGRKLIIDQNVFIEGTLPMGVVRPLTEVEMDHYREPFLNPVDREPLWRFPNELPIAGEPANIVALVEEYMDWLHQSPVPKLLFWGTPGVLIPPAEAARLAKSLPNCKAVDIGPGLNLLQEDNPDLIGSEIARWLSTLEISG

SEQ ID NO: 1333 - protein, 277 aa, Synthetic construct
MFHYVDVGPRDGTPVLFLHGNPTSSHVWRNIIPHVAPTHRCIAPDLIGMGKSDKPDLGYFFDDHVRFMDAFIEALGLEEVVLVIHDWGSALGFHWAKRNPERVKGIAFMEFIRPIPTWDEWPEFARETFQAFRTTDVGRKLIIDQNVFIEGTLPMGVVRPLTEVEMDHYREPFLNPVDREPLWRFPNELPIAGEPANIVALVEEYMDWLHQSPVPKLLFWGTPGVLIPPAEAARLAKSLPNCKAVDIGPGLNLLQEDNPDLIGSEIARWLSTLEISG

SEQ ID NO: 1334 - protein, 277 aa, Synthetic construct
MFHYVDVGPRDGTPVLFLHGNPTSSLVWRNIIPHVAPTHRCIAPDLIGMGKSDKPDLGYFFDDHVRFMDAFIEALGLEEVVLVIHDWGSALGFHWAKRNPERVKGIAFMEFIRPIPTWDEWPEFARETFQAFRTTDVGRKLIIDQNVFIEGTLPMGVVRPLTEVEMDHYREPFLNPVDREPLWRFPNELPIAGEPANIVALVEEYMDWLHQSPVPKLLFWGTPGVLIPPAEAARLAKSLPNCKAVDIGPGLNLLQEDNPDLIGSEIARWLSTLEISG

SEQ ID NO: 1335 - protein, 277 aa, Synthetic construct
MFHYVDVGPRDGTPVLFLHGNPTSSAVWRNIIPHVAPTHRCIAPDLIGMGKSDKPDLGYFFDDHVRFMDAFIEALGLEEVVLVIHDWGSALGFHWAKRNPERVKGIAFMEFIRPIPTWDEWPEFARETFQAFRTTDVGRKLIIDQNVFIEGTLPMGVVRPLTEVEMDHYREPFLNPVDREPLWRFPNELPIAGEPANIVALVEEYMDWLHQSPVPKLLFWGTPGVLIPPAEAARLAKSLPNCKAVDIGPGLNLLQEDNPDLIGSEIARWLSTLEISG

SEQ ID NO: 1336 - protein, 277 aa, Synthetic construct
MFHYVDVGPRDGTPVLFLHGNPTSSVVWRNIIPHVAPTHRCIAPDLIGMGKSDKPDLGYFFDDHVRFMDAFIEALGLEEVVLVIHDWGSALGFHWAKRNPERVKGIAFMEFIRPIPTWDEWPEFARETFQAFRTTDVGRKLIIDQNVFIEGTLPMGVVRPLTEVEMDHYREPFLNPVDREPLWRFPNELPIAGEPANIVALVEEYMDWLHQSPVPKLLFWGTPGVLIPPAEAARLAKSLPNCKAVDIGPGLNLLQEDNPDLIGSEIARWLSTLEISG

SEQ ID NO: 1337 - protein, 277 aa, Synthetic construct
MFHYVDVGPRDGTPVLFLHGNPTSSWVWRNIIPHVAPTHRCIAPDLIGMGKSDKPDLGYFFDDHVRFMDAFIEALGLEEVVLVIHDWGSALGFHWAKRNPERVKGIAFMEFIRPIPTWDEWPEFARETFQAFRTTDVGRKLIIDQNVFIEGTLPMGVVRPLTEVEMDHYREPFLNPVDREPLWRFPNELPIAGEPANIVALVEEYMDWLHQSPVPKLLFWGTPGVLIPPAEAARLAKSLPNCKAVDIGPGLNLLQEDNPDLIGSEIARWLSTLEISG

SEQ ID NO: 1338 - protein, 277 aa, Synthetic construct
MFHYVDVGPRDGTPVLFLHGNPTSSYLWRNIIPHVAPTHRCIAPDLIGMGKSDKPDLGYFFDDHVRFMDAFIEALGLEEVVLVIHDWGSALGFHWAKRNPERVKGIAFMEFIRPIPTWDEWPEFARETFQAFRTTDVGRKLIIDQNVFIEGTLPMGVVRPLTEVEMDHYREPFLNPVDREPLWRFPNELPIAGEPANIVALVEEYMDWLHQSPVPKLLFWGTPGVLIPPAEAARLAKSLPNCKAVDIGPGLNLLQEDNPDLIGSEIARWLSTLEISG

SEQ ID NO: 1339 - protein, 277 aa, Synthetic construct
MFHYVDVGPRDGTPVLFLHGNPTSSYIWRNIIPHVAPTHRCIAPDLIGMGKSDKPDLGYFFDDHVRFMDAFIEALGLEEVVLVIHDWGSALGFHWAKRNPERVKGIAFMEFIRPIPTWDEWPEFARETFQAFRTTDVGRKLIIDQNVFIEGTLPMGVVRPLTEVEMDHYREPFLNPVDREPLWRFPNELPIAGEPANIVALVEEYMDWLHQSPVPKLLFWGTPGVLIPPAEAARLAKSLPNCKAVDIGPGLNLLQEDNPDLIGSEIARWLSTLEISG

SEQ ID NO: 1340 - protein, 277 aa, Synthetic construct
MFHYVDVGPRDGTPVLFLHGNPTSSYMWRNIIPHVAPTHRCIAPDLIGMGKSDKPDLGYFFDDHVRFMDAFIEALGLEEVVLVIHDWGSALGFHWAKRNPERVKGIAFMEFIRPIPTWDEWPEFARETFQAFRTTDVGRKLIIDQNVFIEGTLPMGVVRPLTEVEMDHYREPFLNPVDREPLWRFPNELPIAGEPANIVALVEEYMDWLHQSPVPKLLFWGTPGVLIPPAEAARLAKSLPNCKAVDIGPGLNLLQEDNPDLIGSEIARWLSTLEISG

SEQ ID NO: 1341 - protein, 277 aa, Synthetic construct
MFHYVDVGPRDGTPVLFLHGNPTSSYTWRNIIPHVAPTHRCIAPDLIGMGKSDKPDLGYFFDDHVRFMDAFIEALGLEEVVLVIHDWGSALGFHWAKRNPERVKGIAFMEFIRPIPTWDEWPEFARETFQAFRTTDVGRKLIIDQNVFIEGTLPMGVVRPLTEVEMDHYREPFLNPVDREPLWRFPNELPIAGEPANIVALVEEYMDWLHQSPVPKLLFWGTPGVLIPPAEAARLAKSLPNCKAVDIGPGLNLLQEDNPDLIGSEIARWLSTLEISG

SEQ ID NO: 1342 - protein, 277 aa, Synthetic construct
MFHYVDVGPRDGTPVLFLHGNPTSSYAWRNIIPHVAPTHRCIAPDLIGMGKSDKPDLGYFFDDHVRFMDAFIEALGLEEVVLVIHDWGSALGFHWAKRNPERVKGIAFMEFIRPIPTWDEWPEFARETFQAFRTTDVGRKLIIDQNVFIEGTLPMGVVRPLTEVEMDHYREPFLNPVDREPLWRFPNELPIAGEPANIVALVEEYMDWLHQSPVPKLLFWGTPGVLIPPAEAARLAKSLPNCKAVDIGPGLNLLQEDNPDLIGSEIARWLSTLEISG

SEQ ID NO: 1343 - protein, 277 aa, Synthetic construct
MFHYVDVGPRDGTPVLFLHGNPTSSYQWRNIIPHVAPTHRCIAPDLIGMGKSDKPDLGYFFDDHVRFMDAFIEALGLEEVVLVIHDWGSALGFHWAKRNPERVKGIAFMEFIRPIPTWDEWPEFARETFQAFRTTDVGRKLIIDQNVFIEGTLPMGVVRPLTEVEMDHYREPFLNPVDREPLWRFPNELPIAGEPANIVALVEEYMDWLHQSPVPKLLFWGTPGVLIPPAEAARLAKSLPNCKAVDIGPGLNLLQEDNPDLIGSEIARWLSTLEISG

SEQ ID NO: 1344 - protein, 277 aa, Synthetic construct
MFHYVDVGPRDGTPVLFLHGNPTSSYVYRNIIPHVAPTHRCIAPDLIGMGKSDKPDLGYFFDDHVRFMDAFIEALGLEEVVLVIHDWGSALGFHWAKRNPERVKGIAFMEFIRPIPTWDEWPEFARETFQAFRTTDVGRKLIIDQNVFIEGTLPMGVVRPLTEVEMDHYREPFLNPVDREPLWRFPNELPIAGEPANIVALVEEYMDWLHQSPVPKLLFWGTPGVLIPPAEAARLAKSLPNCKAVDIGPGLNLLQEDNPDLIGSEIARWLSTLEISG

SEQ ID NO: 1345 - protein, 277 aa, Synthetic construct
MFHYVDVGPRDGTPVLFLHGNPTSSYVFRNIIPHVAPTHRCIAPDLIGMGKSDKPDLGYFFDDHVRFMDAFIEALGLEEVVLVIHDWGSALGFHWAKRNPERVKGIAFMEFIRPIPTWDEWPEFARETFQAFRTTDVGRKLIIDQNVFIEGTLPMGVVRPLTEVEMDHYREPFLNPVDREPLWRFPNELPIAGEPANIVALVEEYMDWLHQSPVPKLLFWGTPGVLIPPAEAARLAKSLPNCKAVDIGPGLNLLQEDNPDLIGSEIARWLSTLEISG

SEQ ID NO: 1346 - protein, 277 aa, Synthetic construct
MFHYVDVGPRDGTPVLFLHGNPTSSYVLRNIIPHVAPTHRCIAPDLIGMGKSDKPDLGYFFDDHVRFMDAFIEALGLEEVVLVIHDWGSALGFHWAKRNPERVKGIAFMEFIRPIPTWDEWPEFARETFQAFRTTDVGRKLIIDQNVFIEGTLPMGVVRPLTEVEMDHYREPFLNPVDREPLWRFPNELPIAGEPANIVALVEEYMDWLHQSPVPKLLFWGTPGVLIPPAEAARLAKSLPNCKAVDIGPGLNLLQEDNPDLIGSEIARWLSTLEISG

SEQ ID NO: 1347 - protein, 277 aa, Synthetic construct
MFHYVDVGPRDGTPVLFLHGNPTSSYVCRNIIPHVAPTHRCIAPDLIGMGKSDKPDLGYFFDDHVRFMDAFIEALGLEEVVLVIHDWGSALGFHWAKRNPERVKGIAFMEFIRPIPTWDEWPEFARETFQAFRTTDVGRKLIIDQNVFIEGTLPMGVVRPLTEVEMDHYREPFLNPVDREPLWRFPNELPIAGEPANIVALVEEYMDWLHQSPVPKLLFWGTPGVLIPPAEAARLAKSLPNCKAVDIGPGLNLLQEDNPDLIGSEIARWLSTLEISG

SEQ ID NO: 1348 - protein, 277 aa, Synthetic construct
MFHYVDVGPRDGTPVLFLHGNPTSSYVHRNIIPHVAPTHRCIAPDLIGMGKSDKPDLGYFFDDHVRFMDAFIEALGLEEVVLVIHDWGSALGFHWAKRNPERVKGIAFMEFIRPIPTWDEWPEFARETFQAFRTTDVGRKLIIDQNVFIEGTLPMGVVRPLTEVEMDHYREPFLNPVDREPLWRFPNELPIAGEPANIVALVEEYMDWLHQSPVPKLLFWGTPGVLIPPAEAARLAKSLPNCKAVDIGPGLNLLQEDNPDLIGSEIARWLSTLEISG

SEQ ID NO: 1349 - protein, 277 aa, Synthetic construct
MFHYVDVGPRDGTPVLFLHGNPTSSYVRRNIIPHVAPTHRCIAPDLIGMGKSDKPDLGYFFDDHVRFMDAFIEALGLEEVVLVIHDWGSALGFHWAKRNPERVKGIAFMEFIRPIPTWDEWPEFARETFQAFRTTDVGRKLIIDQNVFIEGTLPMGVVRPLTEVEMDHYREPFLNPVDREPLWRFPNELPIAGEPANIVALVEEYMDWLHQSPVPKLLFWGTPGVLIPPAEAARLAKSLPNCKAVDIGPGLNLLQEDNPDLIGSEIARWLSTLEISG

SEQ ID NO: 1350 - protein, 277 aa, Synthetic construct
MFHYVDVGPRDGTPVLFLHGNPTSSYVWHNIIPHVAPTHRCIAPDLIGMGKSDKPDLGYFFDDHVRFMDAFIEALGLEEVVLVIHDWGSALGFHWAKRNPERVKGIAFMEFIRPIPTWDEWPEFARETFQAFRTTDVGRKLIIDQNVFIEGTLPMGVVRPLTEVEMDHYREPFLNPVDREPLWRFPNELPIAGEPANIVALVEEYMDWLHQSPVPKLLFWGTPGVLIPPAEAARLAKSLPNCKAVDIGPGLNLLQEDNPDLIGSEIARWLSTLEISG

SEQ ID NO: 1351 - protein, 277 aa, Synthetic construct
MFHYVDVGPRDGTPVLFLHGNPTSSYVWKNIIPHVAPTHRCIAPDLIGMGKSDKPDLGYFFDDHVRFMDAFIEALGLEEVVLVIHDWGSALGFHWAKRNPERVKGIAFMEFIRPIPTWDEWPEFARETFQAFRTTDVGRKLIIDQNVFIEGTLPMGVVRPLTEVEMDHYREPFLNPVDREPLWRFPNELPIAGEPANIVALVEEYMDWLHQSPVPKLLFWGTPGVLIPPAEAARLAKSLPNCKAVDIGPGLNLLQEDNPDLIGSEIARWLSTLEISG

SEQ ID NO: 1352 - protein, 277 aa, Synthetic construct
MFHYVDVGPRDGTPVLFLHGNPTSSYVWSNIIPHVAPTHRCIAPDLIGMGKSDKPDLGYFFDDHVRFMDAFIEALGLEEVVLVIHDWGSALGFHWAKRNPERVKGIAFMEFIRPIPTWDEWPEFARETFQAFRTTDVGRKLIIDQNVFIEGTLPMGVVRPLTEVEMDHYREPFLNPVDREPLWRFPNELPIAGEPANIVALVEEYMDWLHQSPVPKLLFWGTPGVLIPPAEAARLAKSLPNCKAVDIGPGLNLLQEDNPDLIGSEIARWLSTLEISG

SEQ ID NO: 1353 - protein, 277 aa, Synthetic construct
MFHYVDVGPRDGTPVLFLHGNPTSSYVWQNIIPHVAPTHRCIAPDLIGMGKSDKPDLGYFFDDHVRFMDAFIEALGLEEVVLVIHDWGSALGFHWAKRNPERVKGIAFMEFIRPIPTWDEWPEFARETFQAFRTTDVGRKLIIDQNVFIEGTLPMGVVRPLTEVEMDHYREPFLNPVDREPLWRFPNELPIAGEPANIVALVEEYMDWLHQSPVPKLLFWGTPGVLIPPAEAARLAKSLPNCKAVDIGPGLNLLQEDNPDLIGSEIARWLSTLEISG

SEQ ID NO: 1354 - protein, 277 aa, Synthetic construct
MFHYVDVGPRDGTPVLFLHGNPTSSYVWANIIPHVAPTHRCIAPDLIGMGKSDKPDLGYFFDDHVRFMDAFIEALGLEEVVLVIHDWGSALGFHWAKRNPERVKGIAFMEFIRPIPTWDEWPEFARETFQAFRTTDVGRKLIIDQNVFIEGTLPMGVVRPLTEVEMDHYREPFLNPVDREPLWRFPNELPIAGEPANIVALVEEYMDWLHQSPVPKLLFWGTPGVLIPPAEAARLAKSLPNCKAVDIGPGLNLLQEDNPDLIGSEIARWLSTLEISG

SEQ ID NO: 1355 - protein, 277 aa, Synthetic construct
MFHYVDVGPRDGTPVLFLHGNPTSSYVWGNIIPHVAPTHRCIAPDLIGMGKSDKPDLGYFFDDHVRFMDAFIEALGLEEVVLVIHDWGSALGFHWAKRNPERVKGIAFMEFIRPIPTWDEWPEFARETFQAFRTTDVGRKLIIDQNVFIEGTLPMGVVRPLTEVEMDHYREPFLNPVDREPLWRFPNELPIAGEPANIVALVEEYMDWLHQSPVPKLLFWGTPGVLIPPAEAARLAKSLPNCKAVDIGPGLNLLQEDNPDLIGSEIARWLSTLEISG

SEQ ID NO: 1356 - protein, 277 aa, Synthetic construct
MFHYVDVGPRDGTPVLFLHGNPTSSYVWRHIIPHVAPTHRCIAPDLIGMGKSDKPDLGYFFDDHVRFMDAFIEALGLEEVVLVIHDWGSALGFHWAKRNPERVKGIAFMEFIRPIPTWDEWPEFARETFQAFRTTDVGRKLIIDQNVFIEGTLPMGVVRPLTEVEMDHYREPFLNPVDREPLWRFPNELPIAGEPANIVALVEEYMDWLHQSPVPKLLFWGTPGVLIPPAEAARLAKSLPNCKAVDIGPGLNLLQEDNPDLIGSEIARWLSTLEISG

SEQ ID NO: 1357 - protein, 277 aa, Synthetic construct
MFHYVDVGPRDGTPVLFLHGNPTSSYVWRKIIPHVAPTHRCIAPDLIGMGKSDKPDLGYFFDDHVRFMDAFIEALGLEEVVLVIHDWGSALGFHWAKRNPERVKGIAFMEFIRPIPTWDEWPEFARETFQAFRTTDVGRKLIIDQNVFIEGTLPMGVVRPLTEVEMDHYREPFLNPVDREPLWRFPNELPIAGEPANIVALVEEYMDWLHQSPVPKLLFWGTPGVLIPPAEAARLAKSLPNCKAVDIGPGLNLLQEDNPDLIGSEIARWLSTLEISG

SEQ ID NO: 1358 - protein, 277 aa, Synthetic construct
MFHYVDVGPRDGTPVLFLHGNPTSSYVWRDIIPHVAPTHRCIAPDLIGMGKSDKPDLGYFFDDHVRFMDAFIEALGLEEVVLVIHDWGSALGFHWAKRNPERVKGIAFMEFIRPIPTWDEWPEFARETFQAFRTTDVGRKLIIDQNVFIEGTLPMGVVRPLTEVEMDHYREPFLNPVDREPLWRFPNELPIAGEPANIVALVEEYMDWLHQSPVPKLLFWGTPGVLIPPAEAARLAKSLPNCKAVDIGPGLNLLQEDNPDLIGSEIARWLSTLEISG

SEQ ID NO: 1359 - protein, 277 aa, Synthetic construct
MFHYVDVGPRDGTPVLFLHGNPTSSYVWRRIIPHVAPTHRCIAPDLIGMGKSDKPDLGYFFDDHVRFMDAFIEALGLEEVVLVIHDWGSALGFHWAKRNPERVKGIAFMEFIRPIPTWDEWPEFARETFQAFRTTDVGRKLIIDQNVFIEGTLPMGVVRPLTEVEMDHYREPFLNPVDREPLWRFPNELPIAGEPANIVALVEEYMDWLHQSPVPKLLFWGTPGVLIPPAEAARLAKSLPNCKAVDIGPGLNLLQEDNPDLIGSEIARWLSTLEISG

SEQ ID NO: 1360 - protein, 277 aa, Synthetic construct
MFHYVDVGPRDGTPVLFLHGNPTSSYVWRSIIPHVAPTHRCIAPDLIGMGKSDKPDLGYFFDDHVRFMDAFIEALGLEEVVLVIHDWGSALGFHWAKRNPERVKGIAFMEFIRPIPTWDEWPEFARETFQAFRTTDVGRKLIIDQNVFIEGTLPMGVVRPLTEVEMDHYREPFLNPVDREPLWRFPNELPIAGEPANIVALVEEYMDWLHQSPVPKLLFWGTPGVLIPPAEAARLAKSLPNCKAVDIGPGLNLLQEDNPDLIGSEIARWLSTLEISG

SEQ ID NO: 1361 - protein, 277 aa, Synthetic construct
MFHYVDVGPRDGTPVLFLHGNPTSSYVWRGIIPHVAPTHRCIAPDLIGMGKSDKPDLGYFFDDHVRFMDAFIEALGLEEVVLVIHDWGSALGFHWAKRNPERVKGIAFMEFIRPIPTWDEWPEFARETFQAFRTTDVGRKLIIDQNVFIEGTLPMGVVRPLTEVEMDHYREPFLNPVDREPLWRFPNELPIAGEPANIVALVEEYMDWLHQSPVPKLLFWGTPGVLIPPAEAARLAKSLPNCKAVDIGPGLNLLQEDNPDLIGSEIARWLSTLEISG

SEQ ID NO: 1362 - protein, 277 aa, Synthetic construct
MFHYVDVGPRDGTPVLFLHGNPTSSYVWRNVIPHVAPTHRCIAPDLIGMGKSDKPDLGYFFDDHVRFMDAFIEALGLEEVVLVIHDWGSALGFHWAKRNPERVKGIAFMEFIRPIPTWDEWPEFARETFQAFRTTDVGRKLIIDQNVFIEGTLPMGVVRPLTEVEMDHYREPFLNPVDREPLWRFPNELPIAGEPANIVALVEEYMDWLHQSPVPKLLFWGTPGVLIPPAEAARLAKSLPNCKAVDIGPGLNLLQEDNPDLIGSEIARWLSTLEISG

SEQ ID NO: 1363 - protein, 277 aa, Synthetic construct
MFHYVDVGPRDGTPVLFLHGNPTSSYVWRNLIPHVAPTHRCIAPDLIGMGKSDKPDLGYFFDDHVRFMDAFIEALGLEEVVLVIHDWGSALGFHWAKRNPERVKGIAFMEFIRPIPTWDEWPEFARETFQAFRTTDVGRKLIIDQNVFIEGTLPMGVVRPLTEVEMDHYREPFLNPVDREPLWRFPNELPIAGEPANIVALVEEYMDWLHQSPVPKLLFWGTPGVLIPPAEAARLAKSLPNCKAVDIGPGLNLLQEDNPDLIGSEIARWLSTLEISG

SEQ ID NO: 1364 - protein, 277 aa, Synthetic construct
MFHYVDVGPRDGTPVLFLHGNPTSSYVWRNMIPHVAPTHRCIAPDLIGMGKSDKPDLGYFFDDHVRFMDAFIEALGLEEVVLVIHDWGSALGFHWAKRNPERVKGIAFMEFIRPIPTWDEWPEFARETFQAFRTTDVGRKLIIDQNVFIEGTLPMGVVRPLTEVEMDHYREPFLNPVDREPLWRFPNELPIAGEPANIVALVEEYMDWLHQSPVPKLLFWGTPGVLIPPAEAARLAKSLPNCKAVDIGPGLNLLQEDNPDLIGSEIARWLSTLEISG

SEQ ID NO: 1365 - protein, 277 aa, Synthetic construct
MFHYVDVGPRDGTPVLFLHGNPTSSYVWRNAIPHVAPTHRCIAPDLIGMGKSDKPDLGYFFDDHVRFMDAFIEALGLEEVVLVIHDWGSALGFHWAKRNPERVKGIAFMEFIRPIPTWDEWPEFARETFQAFRTTDVGRKLIIDQNVFIEGTLPMGVVRPLTEVEMDHYREPFLNPVDREPLWRFPNELPIAGEPANIVALVEEYMDWLHQSPVPKLLFWGTPGVLIPPAEAARLAKSLPNCKAVDIGPGLNLLQEDNPDLIGSEIARWLSTLEISG

SEQ ID NO: 1366 - protein, 277 aa, Synthetic construct
MFHYVDVGPRDGTPVLFLHGNPTSSYVWRNFIPHVAPTHRCIAPDLIGMGKSDKPDLGYFFDDHVRFMDAFIEALGLEEVVLVIHDWGSALGFHWAKRNPERVKGIAFMEFIRPIPTWDEWPEFARETFQAFRTTDVGRKLIIDQNVFIEGTLPMGVVRPLTEVEMDHYREPFLNPVDREPLWRFPNELPIAGEPANIVALVEEYMDWLHQSPVPKLLFWGTPGVLIPPAEAARLAKSLPNCKAVDIGPGLNLLQEDNPDLIGSEIARWLSTLEISG

SEQ ID NO: 1367 - protein, 277 aa, Synthetic construct
MFHYVDVGPRDGTPVLFLHGNPTSSYVWRNTIPHVAPTHRCIAPDLIGMGKSDKPDLGYFFDDHVRFMDAFIEALGLEEVVLVIHDWGSALGFHWAKRNPERVKGIAFMEFIRPIPTWDEWPEFARETFQAFRTTDVGRKLIIDQNVFIEGTLPMGVVRPLTEVEMDHYREPFLNPVDREPLWRFPNELPIAGEPANIVALVEEYMDWLHQSPVPKLLFWGTPGVLIPPAEAARLAKSLPNCKAVDIGPGLNLLQEDNPDLIGSEIARWLSTLEISG

SEQ ID NO: 1368 - protein, 277 aa, Synthetic construct
MFHYVDVGPRDGTPVLFLHGNPTSSYVWRNILPHVAPTHRCIAPDLIGMGKSDKPDLGYFFDDHVRFMDAFIEALGLEEVVLVIHDWGSALGFHWAKRNPERVKGIAFMEFIRPIPTWDEWPEFARETFQAFRTTDVGRKLIIDQNVFIEGTLPMGVVRPLTEVEMDHYREPFLNPVDREPLWRFPNELPIAGEPANIVALVEEYMDWLHQSPVPKLLFWGTPGVLIPPAEAARLAKSLPNCKAVDIGPGLNLLQEDNPDLIGSEIARWLSTLEISG

SEQ ID NO: 1369 - protein, 277 aa, Synthetic construct
MFHYVDVGPRDGTPVLFLHGNPTSSYVWRNIMPHVAPTHRCIAPDLIGMGKSDKPDLGYFFDDHVRFMDAFIEALGLEEVVLVIHDWGSALGFHWAKRNPERVKGIAFMEFIRPIPTWDEWPEFARETFQAFRTTDVGRKLIIDQNVFIEGTLPMGVVRPLTEVEMDHYREPFLNPVDREPLWRFPNELPIAGEPANIVALVEEYMDWLHQSPVPKLLFWGTPGVLIPPAEAARLAKSLPNCKAVDIGPGLNLLQEDNPDLIGSEIARWLSTLEISG

SEQ ID NO: 1370 - protein, 277 aa, Synthetic construct
MFHYVDVGPRDGTPVLFLHGNPTSSYVWRNIVPHVAPTHRCIAPDLIGMGKSDKPDLGYFFDDHVRFMDAFIEALGLEEVVLVIHDWGSALGFHWAKRNPERVKGIAFMEFIRPIPTWDEWPEFARETFQAFRTTDVGRKLIIDQNVFIEGTLPMGVVRPLTEVEMDHYREPFLNPVDREPLWRFPNELPIAGEPANIVALVEEYMDWLHQSPVPKLLFWGTPGVLIPPAEAARLAKSLPNCKAVDIGPGLNLLQEDNPDLIGSEIARWLSTLEISG

SEQ ID NO: 1371 - protein, 277 aa, Synthetic construct
MFHYVDVGPRDGTPVLFLHGNPTSSYVWRNIAPHVAPTHRCIAPDLIGMGKSDKPDLGYFFDDHVRFMDAFIEALGLEEVVLVIHDWGSALGFHWAKRNPERVKGIAFMEFIRPIPTWDEWPEFARETFQAFRTTDVGRKLIIDQNVFIEGTLPMGVVRPLTEVEMDHYREPFLNPVDREPLWRFPNELPIAGEPANIVALVEEYMDWLHQSPVPKLLFWGTPGVLIPPAEAARLAKSLPNCKAVDIGPGLNLLQEDNPDLIGSEIARWLSTLEISG

SEQ ID NO: 1372 - protein, 277 aa, Synthetic construct
MFHYVDVGPRDGTPVLFLHGNPTSSYVWRNIFPHVAPTHRCIAPDLIGMGKSDKPDLGYFFDDHVRFMDAFIEALGLEEVVLVIHDWGSALGFHWAKRNPERVKGIAFMEFIRPIPTWDEWPEFARETFQAFRTTDVGRKLIIDQNVFIEGTLPMGVVRPLTEVEMDHYREPFLNPVDREPLWRFPNELPIAGEPANIVALVEEYMDWLHQSPVPKLLFWGTPGVLIPPAEAARLAKSLPNCKAVDIGPGLNLLQEDNPDLIGSEIARWLSTLEISG

SEQ ID NO: 1373 - protein, 277 aa, Synthetic construct
MFHYVDVGPRDGTPVLFLHGNPTSSYVWRNITPHVAPTHRCIAPDLIGMGKSDKPDLGYFFDDHVRFMDAFIEALGLEEVVLVIHDWGSALGFHWAKRNPERVKGIAFMEFIRPIPTWDEWPEFARETFQAFRTTDVGRKLIIDQNVFIEGTLPMGVVRPLTEVEMDHYREPFLNPVDREPLWRFPNELPIAGEPANIVALVEEYMDWLHQSPVPKLLFWGTPGVLIPPAEAARLAKSLPNCKAVDIGPGLNLLQEDNPDLIGSEIARWLSTLEISG

SEQ ID NO: 1374 - protein, 277 aa, Synthetic construct
MFHYVDVGPRDGTPVLFLHGNPTSSYVWRNIIAHVAPTHRCIAPDLIGMGKSDKPDLGYFFDDHVRFMDAFIEALGLEEVVLVIHDWGSALGFHWAKRNPERVKGIAFMEFIRPIPTWDEWPEFARETFQAFRTTDVGRKLIIDQNVFIEGTLPMGVVRPLTEVEMDHYREPFLNPVDREPLWRFPNELPIAGEPANIVALVEEYMDWLHQSPVPKLLFWGTPGVLIPPAEAARLAKSLPNCKAVDIGPGLNLLQEDNPDLIGSEIARWLSTLEISG

SEQ ID NO: 1375 - protein, 277 aa, Synthetic construct
MFHYVDVGPRDGTPVLFLHGNPTSSYVWRNIIRHVAPTHRCIAPDLIGMGKSDKPDLGYFFDDHVRFMDAFIEALGLEEVVLVIHDWGSALGFHWAKRNPERVKGIAFMEFIRPIPTWDEWPEFARETFQAFRTTDVGRKLIIDQNVFIEGTLPMGVVRPLTEVEMDHYREPFLNPVDREPLWRFPNELPIAGEPANIVALVEEYMDWLHQSPVPKLLFWGTPGVLIPPAEAARLAKSLPNCKAVDIGPGLNLLQEDNPDLIGSEIARWLSTLEISG

SEQ ID NO: 1376 - protein, 277 aa, Synthetic construct
MFHYVDVGPRDGTPVLFLHGNPTSSYVWRNIISHVAPTHRCIAPDLIGMGKSDKPDLGYFFDDHVRFMDAFIEALGLEEVVLVIHDWGSALGFHWAKRNPERVKGIAFMEFIRPIPTWDEWPEFARETFQAFRTTDVGRKLIIDQNVFIEGTLPMGVVRPLTEVEMDHYREPFLNPVDREPLWRFPNELPIAGEPANIVALVEEYMDWLHQSPVPKLLFWGTPGVLIPPAEAARLAKSLPNCKAVDIGPGLNLLQEDNPDLIGSEIARWLSTLEISG

SEQ ID NO: 1377 - protein, 277 aa, Synthetic construct
MFHYVDVGPRDGTPVLFLHGNPTSSYVWRNIIKHVAPTHRCIAPDLIGMGKSDKPDLGYFFDDHVRFMDAFIEALGLEEVVLVIHDWGSALGFHWAKRNPERVKGIAFMEFIRPIPTWDEWPEFARETFQAFRTTDVGRKLIIDQNVFIEGTLPMGVVRPLTEVEMDHYREPFLNPVDREPLWRFPNELPIAGEPANIVALVEEYMDWLHQSPVPKLLFWGTPGVLIPPAEAARLAKSLPNCKAVDIGPGLNLLQEDNPDLIGSEIARWLSTLEISG

SEQ ID NO: 1378 - protein, 277 aa, Synthetic construct
MFHYVDVGPRDGTPVLFLHGNPTSSYVWRNIIGHVAPTHRCIAPDLIGMGKSDKPDLGYFFDDHVRFMDAFIEALGLEEVVLVIHDWGSALGFHWAKRNPERVKGIAFMEFIRPIPTWDEWPEFARETFQAFRTTDVGRKLIIDQNVFIEGTLPMGVVRPLTEVEMDHYREPFLNPVDREPLWRFPNELPIAGEPANIVALVEEYMDWLHQSPVPKLLFWGTPGVLIPPAEAARLAKSLPNCKAVDIGPGLNLLQEDNPDLIGSEIARWLSTLEISG

SEQ ID NO: 1379 - protein, 277 aa, Synthetic construct
MFHYVDVGPRDGTPVLFLHGNPTSSYVWRNIIEHVAPTHRCIAPDLIGMGKSDKPDLGYFFDDHVRFMDAFIEALGLEEVVLVIHDWGSALGFHWAKRNPERVKGIAFMEFIRPIPTWDEWPEFARETFQAFRTTDVGRKLIIDQNVFIEGTLPMGVVRPLTEVEMDHYREPFLNPVDREPLWRFPNELPIAGEPANIVALVEEYMDWLHQSPVPKLLFWGTPGVLIPPAEAARLAKSLPNCKAVDIGPGLNLLQEDNPDLIGSEIARWLSTLEISG

SEQ ID NO: 1380 - protein, 277 aa, Synthetic construct
MFHYVDVGPRDGTPVLFLHGNPTSSYVWRNIIPYVAPTHRCIAPDLIGMGKSDKPDLGYFFDDHVRFMDAFIEALGLEEVVLVIHDWGSALGFHWAKRNPERVKGIAFMEFIRPIPTWDEWPEFARETFQAFRTTDVGRKLIIDQNVFIEGTLPMGVVRPLTEVEMDHYREPFLNPVDREPLWRFPNELPIAGEPANIVALVEEYMDWLHQSPVPKLLFWGTPGVLIPPAEAARLAKSLPNCKAVDIGPGLNLLQEDNPDLIGSEIARWLSTLEISG

SEQ ID NO: 1381 - protein, 277 aa, Synthetic construct
MFHYVDVGPRDGTPVLFLHGNPTSSYVWRNIIPAVAPTHRCIAPDLIGMGKSDKPDLGYFFDDHVRFMDAFIEALGLEEVVLVIHDWGSALGFHWAKRNPERVKGIAFMEFIRPIPTWDEWPEFARETFQAFRTTDVGRKLIIDQNVFIEGTLPMGVVRPLTEVEMDHYREPFLNPVDREPLWRFPNELPIAGEPANIVALVEEYMDWLHQSPVPKLLFWGTPGVLIPPAEAARLAKSLPNCKAVDIGPGLNLLQEDNPDLIGSEIARWLSTLEISG

SEQ ID NO: 1382 - protein, 277 aa, Synthetic construct
MFHYVDVGPRDGTPVLFLHGNPTSSYVWRNIIPRVAPTHRCIAPDLIGMGKSDKPDLGYFFDDHVRFMDAFIEALGLEEVVLVIHDWGSALGFHWAKRNPERVKGIAFMEFIRPIPTWDEWPEFARETFQAFRTTDVGRKLIIDQNVFIEGTLPMGVVRPLTEVEMDHYREPFLNPVDREPLWRFPNELPIAGEPANIVALVEEYMDWLHQSPVPKLLFWGTPGVLIPPAEAARLAKSLPNCKAVDIGPGLNLLQEDNPDLIGSEIARWLSTLEISG

SEQ ID NO: 1383 - protein, 277 aa, Synthetic construct
MFHYVDVGPRDGTPVLFLHGNPTSSYVWRNIIPFVAPTHRCIAPDLIGMGKSDKPDLGYFFDDHVRFMDAFIEALGLEEVVLVIHDWGSALGFHWAKRNPERVKGIAFMEFIRPIPTWDEWPEFARETFQAFRTTDVGRKLIIDQNVFIEGTLPMGVVRPLTEVEMDHYREPFLNPVDREPLWRFPNELPIAGEPANIVALVEEYMDWLHQSPVPKLLFWGTPGVLIPPAEAARLAKSLPNCKAVDIGPGLNLLQEDNPDLIGSEIARWLSTLEISG

SEQ ID NO: 1384 - protein, 277 aa, Synthetic construct
MFHYVDVGPRDGTPVLFLHGNPTSSYVWRNIIPQVAPTHRCIAPDLIGMGKSDKPDLGYFFDDHVRFMDAFIEALGLEEVVLVIHDWGSALGFHWAKRNPERVKGIAFMEFIRPIPTWDEWPEFARETFQAFRTTDVGRKLIIDQNVFIEGTLPMGVVRPLTEVEMDHYREPFLNPVDREPLWRFPNELPIAGEPANIVALVEEYMDWLHQSPVPKLLFWGTPGVLIPPAEAARLAKSLPNCKAVDIGPGLNLLQEDNPDLIGSEIARWLSTLEISG

SEQ ID NO: 1385 - protein, 277 aa, Synthetic construct
MFHYVDVGPRDGTPVLFLHGNPTSSYVWRNIIPLVAPTHRCIAPDLIGMGKSDKPDLGYFFDDHVRFMDAFIEALGLEEVVLVIHDWGSALGFHWAKRNPERVKGIAFMEFIRPIPTWDEWPEFARETFQAFRTTDVGRKLIIDQNVFIEGTLPMGVVRPLTEVEMDHYREPFLNPVDREPLWRFPNELPIAGEPANIVALVEEYMDWLHQSPVPKLLFWGTPGVLIPPAEAARLAKSLPNCKAVDIGPGLNLLQEDNPDLIGSEIARWLSTLEISG

SEQ ID NO: 1386 - protein, 277 aa, Synthetic construct
MFHYVDVGPRDGTPVLFLHGNPTSSYVWRNIIPHLAPTHRCIAPDLIGMGKSDKPDLGYFFDDHVRFMDAFIEALGLEEVVLVIHDWGSALGFHWAKRNPERVKGIAFMEFIRPIPTWDEWPEFARETFQAFRTTDVGRKLIIDQNVFIEGTLPMGVVRPLTEVEMDHYREPFLNPVDREPLWRFPNELPIAGEPANIVALVEEYMDWLHQSPVPKLLFWGTPGVLIPPAEAARLAKSLPNCKAVDIGPGLNLLQEDNPDLIGSEIARWLSTLEISG

SEQ ID NO: 1387 - protein, 277 aa, Synthetic construct
MFHYVDVGPRDGTPVLFLHGNPTSSYVWRNIIPHIAPTHRCIAPDLIGMGKSDKPDLGYFFDDHVRFMDAFIEALGLEEVVLVIHDWGSALGFHWAKRNPERVKGIAFMEFIRPIPTWDEWPEFARETFQAFRTTDVGRKLIIDQNVFIEGTLPMGVVRPLTEVEMDHYREPFLNPVDREPLWRFPNELPIAGEPANIVALVEEYMDWLHQSPVPKLLFWGTPGVLIPPAEAARLAKSLPNCKAVDIGPGLNLLQEDNPDLIGSEIARWLSTLEISG

SEQ ID NO: 1388 - protein, 277 aa, Synthetic construct
MFHYVDVGPRDGTPVLFLHGNPTSSYVWRNIIPHFAPTHRCIAPDLIGMGKSDKPDLGYFFDDHVRFMDAFIEALGLEEVVLVIHDWGSALGFHWAKRNPERVKGIAFMEFIRPIPTWDEWPEFARETFQAFRTTDVGRKLIIDQNVFIEGTLPMGVVRPLTEVEMDHYREPFLNPVDREPLWRFPNELPIAGEPANIVALVEEYMDWLHQSPVPKLLFWGTPGVLIPPAEAARLAKSLPNCKAVDIGPGLNLLQEDNPDLIGSEIARWLSTLEISG

SEQ ID NO: 1389 - protein, 277 aa, Synthetic construct
MFHYVDVGPRDGTPVLFLHGNPTSSYVWRNIIPHAAPTHRCIAPDLIGMGKSDKPDLGYFFDDHVRFMDAFIEALGLEEVVLVIHDWGSALGFHWAKRNPERVKGIAFMEFIRPIPTWDEWPEFARETFQAFRTTDVGRKLIIDQNVFIEGTLPMGVVRPLTEVEMDHYREPFLNPVDREPLWRFPNELPIAGEPANIVALVEEYMDWLHQSPVPKLLFWGTPGVLIPPAEAARLAKSLPNCKAVDIGPGLNLLQEDNPDLIGSEIARWLSTLEISG

SEQ ID NO: 1390 - protein, 277 aa, Synthetic construct
MFHYVDVGPRDGTPVLFLHGNPTSSYVWRNIIPHMAPTHRCIAPDLIGMGKSDKPDLGYFFDDHVRFMDAFIEALGLEEVVLVIHDWGSALGFHWAKRNPERVKGIAFMEFIRPIPTWDEWPEFARETFQAFRTTDVGRKLIIDQNVFIEGTLPMGVVRPLTEVEMDHYREPFLNPVDREPLWRFPNELPIAGEPANIVALVEEYMDWLHQSPVPKLLFWGTPGVLIPPAEAARLAKSLPNCKAVDIGPGLNLLQEDNPDLIGSEIARWLSTLEISG

SEQ ID NO: 1391 - protein, 277 aa, Synthetic construct
MFHYVDVGPRDGTPVLFLHGNPTSSYVWRNIIPHTAPTHRCIAPDLIGMGKSDKPDLGYFFDDHVRFMDAFIEALGLEEVVLVIHDWGSALGFHWAKRNPERVKGIAFMEFIRPIPTWDEWPEFARETFQAFRTTDVGRKLIIDQNVFIEGTLPMGVVRPLTEVEMDHYREPFLNPVDREPLWRFPNELPIAGEPANIVALVEEYMDWLHQSPVPKLLFWGTPGVLIPPAEAARLAKSLPNCKAVDIGPGLNLLQEDNPDLIGSEIARWLSTLEISG

SEQ ID NO: 1392 - protein, 277 aa, Synthetic construct
MFHYVDVGPRDGTPVLFLHGNPTSSYVWRNIIPHVSPTHRCIAPDLIGMGKSDKPDLGYFFDDHVRFMDAFIEALGLEEVVLVIHDWGSALGFHWAKRNPERVKGIAFMEFIRPIPTWDEWPEFARETFQAFRTTDVGRKLIIDQNVFIEGTLPMGVVRPLTEVEMDHYREPFLNPVDREPLWRFPNELPIAGEPANIVALVEEYMDWLHQSPVPKLLFWGTPGVLIPPAEAARLAKSLPNCKAVDIGPGLNLLQEDNPDLIGSEIARWLSTLEISG

SEQ ID NO: 1393 - protein, 277 aa, Synthetic construct
MFHYVDVGPRDGTPVLFLHGNPTSSYVWRNIIPHVTPTHRCIAPDLIGMGKSDKPDLGYFFDDHVRFMDAFIEALGLEEVVLVIHDWGSALGFHWAKRNPERVKGIAFMEFIRPIPTWDEWPEFARETFQAFRTTDVGRKLIIDQNVFIEGTLPMGVVRPLTEVEMDHYREPFLNPVDREPLWRFPNELPIAGEPANIVALVEEYMDWLHQSPVPKLLFWGTPGVLIPPAEAARLAKSLPNCKAVDIGPGLNLLQEDNPDLIGSEIARWLSTLEISG

SEQ ID NO: 1394 - protein, 277 aa, Synthetic construct
MFHYVDVGPRDGTPVLFLHGNPTSSYVWRNIIPHVEPTHRCIAPDLIGMGKSDKPDLGYFFDDHVRFMDAFIEALGLEEVVLVIHDWGSALGFHWAKRNPERVKGIAFMEFIRPIPTWDEWPEFARETFQAFRTTDVGRKLIIDQNVFIEGTLPMGVVRPLTEVEMDHYREPFLNPVDREPLWRFPNELPIAGEPANIVALVEEYMDWLHQSPVPKLLFWGTPGVLIPPAEAARLAKSLPNCKAVDIGPGLNLLQEDNPDLIGSEIARWLSTLEISG

SEQ ID NO: 1395 - protein, 277 aa, Synthetic construct
MFHYVDVGPRDGTPVLFLHGNPTSSYVWRNIIPHVGPTHRCIAPDLIGMGKSDKPDLGYFFDDHVRFMDAFIEALGLEEVVLVIHDWGSALGFHWAKRNPERVKGIAFMEFIRPIPTWDEWPEFARETFQAFRTTDVGRKLIIDQNVFIEGTLPMGVVRPLTEVEMDHYREPFLNPVDREPLWRFPNELPIAGEPANIVALVEEYMDWLHQSPVPKLLFWGTPGVLIPPAEAARLAKSLPNCKAVDIGPGLNLLQEDNPDLIGSEIARWLSTLEISG

SEQ ID NO: 1396 - protein, 277 aa, Synthetic construct
MFHYVDVGPRDGTPVLFLHGNPTSSYVWRNIIPHVQPTHRCIAPDLIGMGKSDKPDLGYFFDDHVRFMDAFIEALGLEEVVLVIHDWGSALGFHWAKRNPERVKGIAFMEFIRPIPTWDEWPEFARETFQAFRTTDVGRKLIIDQNVFIEGTLPMGVVRPLTEVEMDHYREPFLNPVDREPLWRFPNELPIAGEPANIVALVEEYMDWLHQSPVPKLLFWGTPGVLIPPAEAARLAKSLPNCKAVDIGPGLNLLQEDNPDLIGSEIARWLSTLEISG

SEQ ID NO: 1397 - protein, 277 aa, Synthetic construct
MFHYVDVGPRDGTPVLFLHGNPTSSYVWRNIIPHVLPTHRCIAPDLIGMGKSDKPDLGYFFDDHVRFMDAFIEALGLEEVVLVIHDWGSALGFHWAKRNPERVKGIAFMEFIRPIPTWDEWPEFARETFQAFRTTDVGRKLIIDQNVFIEGTLPMGVVRPLTEVEMDHYREPFLNPVDREPLWRFPNELPIAGEPANIVALVEEYMDWLHQSPVPKLLFWGTPGVLIPPAEAARLAKSLPNCKAVDIGPGLNLLQEDNPDLIGSEIARWLSTLEISG

SEQ ID NO: 1398 - protein, 277 aa, Synthetic construct
MFHYVDVGPRDGTPVLFLHGNPTSSYVWRNIIPHVAATHRCIAPDLIGMGKSDKPDLGYFFDDHVRFMDAFIEALGLEEVVLVIHDWGSALGFHWAKRNPERVKGIAFMEFIRPIPTWDEWPEFARETFQAFRTTDVGRKLIIDQNVFIEGTLPMGVVRPLTEVEMDHYREPFLNPVDREPLWRFPNELPIAGEPANIVALVEEYMDWLHQSPVPKLLFWGTPGVLIPPAEAARLAKSLPNCKAVDIGPGLNLLQEDNPDLIGSEIARWLSTLEISG

SEQ ID NO: 1399 - protein, 277 aa, Synthetic construct
MFHYVDVGPRDGTPVLFLHGNPTSSYVWRNIIPHVAETHRCIAPDLIGMGKSDKPDLGYFFDDHVRFMDAFIEALGLEEVVLVIHDWGSALGFHWAKRNPERVKGIAFMEFIRPIPTWDEWPEFARETFQAFRTTDVGRKLIIDQNVFIEGTLPMGVVRPLTEVEMDHYREPFLNPVDREPLWRFPNELPIAGEPANIVALVEEYMDWLHQSPVPKLLFWGTPGVLIPPAEAARLAKSLPNCKAVDIGPGLNLLQEDNPDLIGSEIARWLSTLEISG

SEQ ID NO: 1400 - protein, 277 aa, Synthetic construct
MFHYVDVGPRDGTPVLFLHGNPTSSYVWRNIIPHVAKTHRCIAPDLIGMGKSDKPDLGYFFDDHVRFMDAFIEALGLEEVVLVIHDWGSALGFHWAKRNPERVKGIAFMEFIRPIPTWDEWPEFARETFQAFRTTDVGRKLIIDQNVFIEGTLPMGVVRPLTEVEMDHYREPFLNPVDREPLWRFPNELPIAGEPANIVALVEEYMDWLHQSPVPKLLFWGTPGVLIPPAEAARLAKSLPNCKAVDIGPGLNLLQEDNPDLIGSEIARWLSTLEISG

SEQ ID NO: 1401 - protein, 277 aa, Synthetic construct
MFHYVDVGPRDGTPVLFLHGNPTSSYVWRNIIPHVAGTHRCIAPDLIGMGKSDKPDLGYFFDDHVRFMDAFIEALGLEEVVLVIHDWGSALGFHWAKRNPERVKGIAFMEFIRPIPTWDEWPEFARETFQAFRTTDVGRKLIIDQNVFIEGTLPMGVVRPLTEVEMDHYREPFLNPVDREPLWRFPNELPIAGEPANIVALVEEYMDWLHQSPVPKLLFWGTPGVLIPPAEAARLAKSLPNCKAVDIGPGLNLLQEDNPDLIGSEIARWLSTLEISG

SEQ ID NO: 1402 - protein, 277 aa, Synthetic construct
MFHYVDVGPRDGTPVLFLHGNPTSSYVWRNIIPHVASTHRCIAPDLIGMGKSDKPDLGYFFDDHVRFMDAFIEALGLEEVVLVIHDWGSALGFHWAKRNPERVKGIAFMEFIRPIPTWDEWPEFARETFQAFRTTDVGRKLIIDQNVFIEGTLPMGVVRPLTEVEMDHYREPFLNPVDREPLWRFPNELPIAGEPANIVALVEEYMDWLHQSPVPKLLFWGTPGVLIPPAEAARLAKSLPNCKAVDIGPGLNLLQEDNPDLIGSEIARWLSTLEISG

SEQ ID NO: 1403 - protein, 277 aa, Synthetic construct
MFHYVDVGPRDGTPVLFLHGNPTSSYVWRNIIPHVADTHRCIAPDLIGMGKSDKPDLGYFFDDHVRFMDAFIEALGLEEVVLVIHDWGSALGFHWAKRNPERVKGIAFMEFIRPIPTWDEWPEFARETFQAFRTTDVGRKLIIDQNVFIEGTLPMGVVRPLTEVEMDHYREPFLNPVDREPLWRFPNELPIAGEPANIVALVEEYMDWLHQSPVPKLLFWGTPGVLIPPAEAARLAKSLPNCKAVDIGPGLNLLQEDNPDLIGSEIARWLSTLEISG

SEQ ID NO: 1404 - protein, 277 aa, Synthetic construct
MFHYVDVGPRDGTPVLFLHGNPTSSYVWRNIIPHVAPHHRCIAPDLIGMGKSDKPDLGYFFDDHVRFMDAFIEALGLEEVVLVIHDWGSALGFHWAKRNPERVKGIAFMEFIRPIPTWDEWPEFARETFQAFRTTDVGRKLIIDQNVFIEGTLPMGVVRPLTEVEMDHYREPFLNPVDREPLWRFPNELPIAGEPANIVALVEEYMDWLHQSPVPKLLFWGTPGVLIPPAEAARLAKSLPNCKAVDIGPGLNLLQEDNPDLIGSEIARWLSTLEISG

SEQ ID NO: 1405 - protein, 277 aa, Synthetic construct
MFHYVDVGPRDGTPVLFLHGNPTSSYVWRNIIPHVAPSHRCIAPDLIGMGKSDKPDLGYFFDDHVRFMDAFIEALGLEEVVLVIHDWGSALGFHWAKRNPERVKGIAFMEFIRPIPTWDEWPEFARETFQAFRTTDVGRKLIIDQNVFIEGTLPMGVVRPLTEVEMDHYREPFLNPVDREPLWRFPNELPIAGEPANIVALVEEYMDWLHQSPVPKLLFWGTPGVLIPPAEAARLAKSLPNCKAVDIGPGLNLLQEDNPDLIGSEIARWLSTLEISG

SEQ ID NO: 1406 - protein, 277 aa, Synthetic construct
MFHYVDVGPRDGTPVLFLHGNPTSSYVWRNIIPHVAPDHRCIAPDLIGMGKSDKPDLGYFFDDHVRFMDAFIEALGLEEVVLVIHDWGSALGFHWAKRNPERVKGIAFMEFIRPIPTWDEWPEFARETFQAFRTTDVGRKLIIDQNVFIEGTLPMGVVRPLTEVEMDHYREPFLNPVDREPLWRFPNELPIAGEPANIVALVEEYMDWLHQSPVPKLLFWGTPGVLIPPAEAARLAKSLPNCKAVDIGPGLNLLQEDNPDLIGSEIARWLSTLEISG

SEQ ID NO: 1407 - protein, 277 aa, Synthetic construct
MFHYVDVGPRDGTPVLFLHGNPTSSYVWRNIIPHVAPRHRCIAPDLIGMGKSDKPDLGYFFDDHVRFMDAFIEALGLEEVVLVIHDWGSALGFHWAKRNPERVKGIAFMEFIRPIPTWDEWPEFARETFQAFRTTDVGRKLIIDQNVFIEGTLPMGVVRPLTEVEMDHYREPFLNPVDREPLWRFPNELPIAGEPANIVALVEEYMDWLHQSPVPKLLFWGTPGVLIPPAEAARLAKSLPNCKAVDIGPGLNLLQEDNPDLIGSEIARWLSTLEISG

SEQ ID NO: 1408 - protein, 277 aa, Synthetic construct
MFHYVDVGPRDGTPVLFLHGNPTSSYVWRNIIPHVAPQHRCIAPDLIGMGKSDKPDLGYFFDDHVRFMDAFIEALGLEEVVLVIHDWGSALGFHWAKRNPERVKGIAFMEFIRPIPTWDEWPEFARETFQAFRTTDVGRKLIIDQNVFIEGTLPMGVVRPLTEVEMDHYREPFLNPVDREPLWRFPNELPIAGEPANIVALVEEYMDWLHQSPVPKLLFWGTPGVLIPPAEAARLAKSLPNCKAVDIGPGLNLLQEDNPDLIGSEIARWLSTLEISG

SEQ ID NO: 1409 - protein, 277 aa, Synthetic construct
MFHYVDVGPRDGTPVLFLHGNPTSSYVWRNIIPHVAPNHRCIAPDLIGMGKSDKPDLGYFFDDHVRFMDAFIEALGLEEVVLVIHDWGSALGFHWAKRNPERVKGIAFMEFIRPIPTWDEWPEFARETFQAFRTTDVGRKLIIDQNVFIEGTLPMGVVRPLTEVEMDHYREPFLNPVDREPLWRFPNELPIAGEPANIVALVEEYMDWLHQSPVPKLLFWGTPGVLIPPAEAARLAKSLPNCKAVDIGPGLNLLQEDNPDLIGSEIARWLSTLEISG

SEQ ID NO: 1410 - protein, 277 aa, Synthetic construct
MFHYVDVGPRDGTPVLFLHGNPTSSYVWRNIIPHVAPTARCIAPDLIGMGKSDKPDLGYFFDDHVRFMDAFIEALGLEEVVLVIHDWGSALGFHWAKRNPERVKGIAFMEFIRPIPTWDEWPEFARETFQAFRTTDVGRKLIIDQNVFIEGTLPMGVVRPLTEVEMDHYREPFLNPVDREPLWRFPNELPIAGEPANIVALVEEYMDWLHQSPVPKLLFWGTPGVLIPPAEAARLAKSLPNCKAVDIGPGLNLLQEDNPDLIGSEIARWLSTLEISG

SEQ ID NO: 1411 - protein, 277 aa, Synthetic construct
MFHYVDVGPRDGTPVLFLHGNPTSSYVWRNIIPHVAPTGRCIAPDLIGMGKSDKPDLGYFFDDHVRFMDAFIEALGLEEVVLVIHDWGSALGFHWAKRNPERVKGIAFMEFIRPIPTWDEWPEFARETFQAFRTTDVGRKLIIDQNVFIEGTLPMGVVRPLTEVEMDHYREPFLNPVDREPLWRFPNELPIAGEPANIVALVEEYMDWLHQSPVPKLLFWGTPGVLIPPAEAARLAKSLPNCKAVDIGPGLNLLQEDNPDLIGSEIARWLSTLEISG

SEQ ID NO: 1412 - protein, 277 aa, Synthetic construct
MFHYVDVGPRDGTPVLFLHGNPTSSYVWRNIIPHVAPTSRCIAPDLIGMGKSDKPDLGYFFDDHVRFMDAFIEALGLEEVVLVIHDWGSALGFHWAKRNPERVKGIAFMEFIRPIPTWDEWPEFARETFQAFRTTDVGRKLIIDQNVFIEGTLPMGVVRPLTEVEMDHYREPFLNPVDREPLWRFPNELPIAGEPANIVALVEEYMDWLHQSPVPKLLFWGTPGVLIPPAEAARLAKSLPNCKAVDIGPGLNLLQEDNPDLIGSEIARWLSTLEISG

SEQ ID NO: 1413 - protein, 277 aa, Synthetic construct
MFHYVDVGPRDGTPVLFLHGNPTSSYVWRNIIPHVAPTCRCIAPDLIGMGKSDKPDLGYFFDDHVRFMDAFIEALGLEEVVLVIHDWGSALGFHWAKRNPERVKGIAFMEFIRPIPTWDEWPEFARETFQAFRTTDVGRKLIIDQNVFIEGTLPMGVVRPLTEVEMDHYREPFLNPVDREPLWRFPNELPIAGEPANIVALVEEYMDWLHQSPVPKLLFWGTPGVLIPPAEAARLAKSLPNCKAVDIGPGLNLLQEDNPDLIGSEIARWLSTLEISG

SEQ ID NO: 1414 - protein, 277 aa, Synthetic construct
MFHYVDVGPRDGTPVLFLHGNPTSSYVWRNIIPHVAPTRRCIAPDLIGMGKSDKPDLGYFFDDHVRFMDAFIEALGLEEVVLVIHDWGSALGFHWAKRNPERVKGIAFMEFIRPIPTWDEWPEFARETFQAFRTTDVGRKLIIDQNVFIEGTLPMGVVRPLTEVEMDHYREPFLNPVDREPLWRFPNELPIAGEPANIVALVEEYMDWLHQSPVPKLLFWGTPGVLIPPAEAARLAKSLPNCKAVDIGPGLNLLQEDNPDLIGSEIARWLSTLEISG

SEQ ID NO: 1415 - protein, 277 aa, Synthetic construct
MFHYVDVGPRDGTPVLFLHGNPTSSYVWRNIIPHVAPTVRCIAPDLIGMGKSDKPDLGYFFDDHVRFMDAFIEALGLEEVVLVIHDWGSALGFHWAKRNPERVKGIAFMEFIRPIPTWDEWPEFARETFQAFRTTDVGRKLIIDQNVFIEGTLPMGVVRPLTEVEMDHYREPFLNPVDREPLWRFPNELPIAGEPANIVALVEEYMDWLHQSPVPKLLFWGTPGVLIPPAEAARLAKSLPNCKAVDIGPGLNLLQEDNPDLIGSEIARWLSTLEISG

SEQ ID NO: 1416 - protein, 277 aa, Synthetic construct
MFHYVDVGPRDGTPVLFLHGNPTSSYVWRNIIPHVAPTHHCIAPDLIGMGKSDKPDLGYFFDDHVRFMDAFIEALGLEEVVLVIHDWGSALGFHWAKRNPERVKGIAFMEFIRPIPTWDEWPEFARETFQAFRTTDVGRKLIIDQNVFIEGTLPMGVVRPLTEVEMDHYREPFLNPVDREPLWRFPNELPIAGEPANIVALVEEYMDWLHQSPVPKLLFWGTPGVLIPPAEAARLAKSLPNCKAVDIGPGLNLLQEDNPDLIGSEIARWLSTLEISG

SEQ ID NO: 1417 - protein, 277 aa, Synthetic construct
MFHYVDVGPRDGTPVLFLHGNPTSSYVWRNIIPHVAPTHYCIAPDLIGMGKSDKPDLGYFFDDHVRFMDAFIEALGLEEVVLVIHDWGSALGFHWAKRNPERVKGIAFMEFIRPIPTWDEWPEFARETFQAFRTTDVGRKLIIDQNVFIEGTLPMGVVRPLTEVEMDHYREPFLNPVDREPLWRFPNELPIAGEPANIVALVEEYMDWLHQSPVPKLLFWGTPGVLIPPAEAARLAKSLPNCKAVDIGPGLNLLQEDNPDLIGSEIARWLSTLEISG

SEQ ID NO: 1418 - protein, 277 aa, Synthetic construct
MFHYVDVGPRDGTPVLFLHGNPTSSYVWRNIIPHVAPTHQCIAPDLIGMGKSDKPDLGYFFDDHVRFMDAFIEALGLEEVVLVIHDWGSALGFHWAKRNPERVKGIAFMEFIRPIPTWDEWPEFARETFQAFRTTDVGRKLIIDQNVFIEGTLPMGVVRPLTEVEMDHYREPFLNPVDREPLWRFPNELPIAGEPANIVALVEEYMDWLHQSPVPKLLFWGTPGVLIPPAEAARLAKSLPNCKAVDIGPGLNLLQEDNPDLIGSEIARWLSTLEISG

SEQ ID NO: 1419 - protein, 277 aa, Synthetic construct
MFHYVDVGPRDGTPVLFLHGNPTSSYVWRNIIPHVAPTHWCIAPDLIGMGKSDKPDLGYFFDDHVRFMDAFIEALGLEEVVLVIHDWGSALGFHWAKRNPERVKGIAFMEFIRPIPTWDEWPEFARETFQAFRTTDVGRKLIIDQNVFIEGTLPMGVVRPLTEVEMDHYREPFLNPVDREPLWRFPNELPIAGEPANIVALVEEYMDWLHQSPVPKLLFWGTPGVLIPPAEAARLAKSLPNCKAVDIGPGLNLLQEDNPDLIGSEIARWLSTLEISG

SEQ ID NO: 1420 - protein, 277 aa, Synthetic construct
MFHYVDVGPRDGTPVLFLHGNPTSSYVWRNIIPHVAPTHKCIAPDLIGMGKSDKPDLGYFFDDHVRFMDAFIEALGLEEVVLVIHDWGSALGFHWAKRNPERVKGIAFMEFIRPIPTWDEWPEFARETFQAFRTTDVGRKLIIDQNVFIEGTLPMGVVRPLTEVEMDHYREPFLNPVDREPLWRFPNELPIAGEPANIVALVEEYMDWLHQSPVPKLLFWGTPGVLIPPAEAARLAKSLPNCKAVDIGPGLNLLQEDNPDLIGSEIARWLSTLEISG

SEQ ID NO: 1421 - protein, 277 aa, Synthetic construct
MFHYVDVGPRDGTPVLFLHGNPTSSYVWRNIIPHVAPTHLCIAPDLIGMGKSDKPDLGYFFDDHVRFMDAFIEALGLEEVVLVIHDWGSALGFHWAKRNPERVKGIAFMEFIRPIPTWDEWPEFARETFQAFRTTDVGRKLIIDQNVFIEGTLPMGVVRPLTEVEMDHYREPFLNPVDREPLWRFPNELPIAGEPANIVALVEEYMDWLHQSPVPKLLFWGTPGVLIPPAEAARLAKSLPNCKAVDIGPGLNLLQEDNPDLIGSEIARWLSTLEISG

SEQ ID NO: 1422 - protein, 277 aa, Synthetic construct
MFHYVDVGPRDGTPVLFLHGNPTSSYVWRNIIPHVAPTHRAIAPDLIGMGKSDKPDLGYFFDDHVRFMDAFIEALGLEEVVLVIHDWGSALGFHWAKRNPERVKGIAFMEFIRPIPTWDEWPEFARETFQAFRTTDVGRKLIIDQNVFIEGTLPMGVVRPLTEVEMDHYREPFLNPVDREPLWRFPNELPIAGEPANIVALVEEYMDWLHQSPVPKLLFWGTPGVLIPPAEAARLAKSLPNCKAVDIGPGLNLLQEDNPDLIGSEIARWLSTLEISG

SEQ ID NO: 1423 - protein, 277 aa, Synthetic construct
MFHYVDVGPRDGTPVLFLHGNPTSSYVWRNIIPHVAPTHRVIAPDLIGMGKSDKPDLGYFFDDHVRFMDAFIEALGLEEVVLVIHDWGSALGFHWAKRNPERVKGIAFMEFIRPIPTWDEWPEFARETFQAFRTTDVGRKLIIDQNVFIEGTLPMGVVRPLTEVEMDHYREPFLNPVDREPLWRFPNELPIAGEPANIVALVEEYMDWLHQSPVPKLLFWGTPGVLIPPAEAARLAKSLPNCKAVDIGPGLNLLQEDNPDLIGSEIARWLSTLEISG

SEQ ID NO: 1424 - protein, 277 aa, Synthetic construct
MFHYVDVGPRDGTPVLFLHGNPTSSYVWRNIIPHVAPTHRLIAPDLIGMGKSDKPDLGYFFDDHVRFMDAFIEALGLEEVVLVIHDWGSALGFHWAKRNPERVKGIAFMEFIRPIPTWDEWPEFARETFQAFRTTDVGRKLIIDQNVFIEGTLPMGVVRPLTEVEMDHYREPFLNPVDREPLWRFPNELPIAGEPANIVALVEEYMDWLHQSPVPKLLFWGTPGVLIPPAEAARLAKSLPNCKAVDIGPGLNLLQEDNPDLIGSEIARWLSTLEISG

SEQ ID NO: 1425 - protein, 277 aa, Synthetic construct
MFHYVDVGPRDGTPVLFLHGNPTSSYVWRNIIPHVAPTHRTIAPDLIGMGKSDKPDLGYFFDDHVRFMDAFIEALGLEEVVLVIHDWGSALGFHWAKRNPERVKGIAFMEFIRPIPTWDEWPEFARETFQAFRTTDVGRKLIIDQNVFIEGTLPMGVVRPLTEVEMDHYREPFLNPVDREPLWRFPNELPIAGEPANIVALVEEYMDWLHQSPVPKLLFWGTPGVLIPPAEAARLAKSLPNCKAVDIGPGLNLLQEDNPDLIGSEIARWLSTLEISG

SEQ ID NO: 1426 - protein, 277 aa, Synthetic construct
MFHYVDVGPRDGTPVLFLHGNPTSSYVWRNIIPHVAPTHRSIAPDLIGMGKSDKPDLGYFFDDHVRFMDAFIEALGLEEVVLVIHDWGSALGFHWAKRNPERVKGIAFMEFIRPIPTWDEWPEFARETFQAFRTTDVGRKLIIDQNVFIEGTLPMGVVRPLTEVEMDHYREPFLNPVDREPLWRFPNELPIAGEPANIVALVEEYMDWLHQSPVPKLLFWGTPGVLIPPAEAARLAKSLPNCKAVDIGPGLNLLQEDNPDLIGSEIARWLSTLEISG

SEQ ID NO: 1427 - protein, 277 aa, Synthetic construct
MFHYVDVGPRDGTPVLFLHGNPTSSYVWRNIIPHVAPTHRIIAPDLIGMGKSDKPDLGYFFDDHVRFMDAFIEALGLEEVVLVIHDWGSALGFHWAKRNPERVKGIAFMEFIRPIPTWDEWPEFARETFQAFRTTDVGRKLIIDQNVFIEGTLPMGVVRPLTEVEMDHYREPFLNPVDREPLWRFPNELPIAGEPANIVALVEEYMDWLHQSPVPKLLFWGTPGVLIPPAEAARLAKSLPNCKAVDIGPGLNLLQEDNPDLIGSEIARWLSTLEISG

SEQ ID NO: 1428 - protein, 277 aa, Synthetic construct
MFHYVDVGPRDGTPVLFLHGNPTSSYVWRNIIPHVAPTHRCLAPDLIGMGKSDKPDLGYFFDDHVRFMDAFIEALGLEEVVLVIHDWGSALGFHWAKRNPERVKGIAFMEFIRPIPTWDEWPEFARETFQAFRTTDVGRKLIIDQNVFIEGTLPMGVVRPLTEVEMDHYREPFLNPVDREPLWRFPNELPIAGEPANIVALVEEYMDWLHQSPVPKLLFWGTPGVLIPPAEAARLAKSLPNCKAVDIGPGLNLLQEDNPDLIGSEIARWLSTLEISG

SEQ ID NO: 1429 - protein, 277 aa, Synthetic construct
MFHYVDVGPRDGTPVLFLHGNPTSSYVWRNIIPHVAPTHRCVAPDLIGMGKSDKPDLGYFFDDHVRFMDAFIEALGLEEVVLVIHDWGSALGFHWAKRNPERVKGIAFMEFIRPIPTWDEWPEFARETFQAFRTTDVGRKLIIDQNVFIEGTLPMGVVRPLTEVEMDHYREPFLNPVDREPLWRFPNELPIAGEPANIVALVEEYMDWLHQSPVPKLLFWGTPGVLIPPAEAARLAKSLPNCKAVDIGPGLNLLQEDNPDLIGSEIARWLSTLEISG

SEQ ID NO: 1430 - protein, 277 aa, Synthetic construct
MFHYVDVGPRDGTPVLFLHGNPTSSYVWRNIIPHVAPTHRCFAPDLIGMGKSDKPDLGYFFDDHVRFMDAFIEALGLEEVVLVIHDWGSALGFHWAKRNPERVKGIAFMEFIRPIPTWDEWPEFARETFQAFRTTDVGRKLIIDQNVFIEGTLPMGVVRPLTEVEMDHYREPFLNPVDREPLWRFPNELPIAGEPANIVALVEEYMDWLHQSPVPKLLFWGTPGVLIPPAEAARLAKSLPNCKAVDIGPGLNLLQEDNPDLIGSEIARWLSTLEISG

SEQ ID NO: 1431 - protein, 277 aa, Synthetic construct
MFHYVDVGPRDGTPVLFLHGNPTSSYVWRNIIPHVAPTHRCMAPDLIGMGKSDKPDLGYFFDDHVRFMDAFIEALGLEEVVLVIHDWGSALGFHWAKRNPERVKGIAFMEFIRPIPTWDEWPEFARETFQAFRTTDVGRKLIIDQNVFIEGTLPMGVVRPLTEVEMDHYREPFLNPVDREPLWRFPNELPIAGEPANIVALVEEYMDWLHQSPVPKLLFWGTPGVLIPPAEAARLAKSLPNCKAVDIGPGLNLLQEDNPDLIGSEIARWLSTLEISG

SEQ ID NO: 1432 - protein, 277 aa, Synthetic construct
MFHYVDVGPRDGTPVLFLHGNPTSSYVWRNIIPHVAPTHRCYAPDLIGMGKSDKPDLGYFFDDHVRFMDAFIEALGLEEVVLVIHDWGSALGFHWAKRNPERVKGIAFMEFIRPIPTWDEWPEFARETFQAFRTTDVGRKLIIDQNVFIEGTLPMGVVRPLTEVEMDHYREPFLNPVDREPLWRFPNELPIAGEPANIVALVEEYMDWLHQSPVPKLLFWGTPGVLIPPAEAARLAKSLPNCKAVDIGPGLNLLQEDNPDLIGSEIARWLSTLEISG

SEQ ID NO: 1433 - protein, 277 aa, Synthetic construct
MFHYVDVGPRDGTPVLFLHGNPTSSYVWRNIIPHVAPTHRCTAPDLIGMGKSDKPDLGYFFDDHVRFMDAFIEALGLEEVVLVIHDWGSALGFHWAKRNPERVKGIAFMEFIRPIPTWDEWPEFARETFQAFRTTDVGRKLIIDQNVFIEGTLPMGVVRPLTEVEMDHYREPFLNPVDREPLWRFPNELPIAGEPANIVALVEEYMDWLHQSPVPKLLFWGTPGVLIPPAEAARLAKSLPNCKAVDIGPGLNLLQEDNPDLIGSEIARWLSTLEISG

SEQ ID NO: 1434 - protein, 277 aa, Synthetic construct
MFHYVDVGPRDGTPVLFLHGNPTSSYVWRNIIPHVAPTHRCIVPDLIGMGKSDKPDLGYFFDDHVRFMDAFIEALGLEEVVLVIHDWGSALGFHWAKRNPERVKGIAFMEFIRPIPTWDEWPEFARETFQAFRTTDVGRKLIIDQNVFIEGTLPMGVVRPLTEVEMDHYREPFLNPVDREPLWRFPNELPIAGEPANIVALVEEYMDWLHQSPVPKLLFWGTPGVLIPPAEAARLAKSLPNCKAVDIGPGLNLLQEDNPDLIGSEIARWLSTLEISG

SEQ ID NO: 1435 - protein, 277 aa, Synthetic construct
MFHYVDVGPRDGTPVLFLHGNPTSSYVWRNIIPHVAPTHRCITPDLIGMGKSDKPDLGYFFDDHVRFMDAFIEALGLEEVVLVIHDWGSALGFHWAKRNPERVKGIAFMEFIRPIPTWDEWPEFARETFQAFRTTDVGRKLIIDQNVFIEGTLPMGVVRPLTEVEMDHYREPFLNPVDREPLWRFPNELPIAGEPANIVALVEEYMDWLHQSPVPKLLFWGTPGVLIPPAEAARLAKSLPNCKAVDIGPGLNLLQEDNPDLIGSEIARWLSTLEISG

SEQ ID NO: 1436 - protein, 277 aa, Synthetic construct
MFHYVDVGPRDGTPVLFLHGNPTSSYVWRNIIPHVAPTHRCISPDLIGMGKSDKPDLGYFFDDHVRFMDAFIEALGLEEVVLVIHDWGSALGFHWAKRNPERVKGIAFMEFIRPIPTWDEWPEFARETFQAFRTTDVGRKLIIDQNVFIEGTLPMGVVRPLTEVEMDHYREPFLNPVDREPLWRFPNELPIAGEPANIVALVEEYMDWLHQSPVPKLLFWGTPGVLIPPAEAARLAKSLPNCKAVDIGPGLNLLQEDNPDLIGSEIARWLSTLEISG

SEQ ID NO: 1437 - protein, 277 aa, Synthetic construct
MFHYVDVGPRDGTPVLFLHGNPTSSYVWRNIIPHVAPTHRCIGPDLIGMGKSDKPDLGYFFDDHVRFMDAFIEALGLEEVVLVIHDWGSALGFHWAKRNPERVKGIAFMEFIRPIPTWDEWPEFARETFQAFRTTDVGRKLIIDQNVFIEGTLPMGVVRPLTEVEMDHYREPFLNPVDREPLWRFPNELPIAGEPANIVALVEEYMDWLHQSPVPKLLFWGTPGVLIPPAEAARLAKSLPNCKAVDIGPGLNLLQEDNPDLIGSEIARWLSTLEISG

SEQ ID NO: 1438 - protein, 277 aa, Synthetic construct
MFHYVDVGPRDGTPVLFLHGNPTSSYVWRNIIPHVAPTHRCICPDLIGMGKSDKPDLGYFFDDHVRFMDAFIEALGLEEVVLVIHDWGSALGFHWAKRNPERVKGIAFMEFIRPIPTWDEWPEFARETFQAFRTTDVGRKLIIDQNVFIEGTLPMGVVRPLTEVEMDHYREPFLNPVDREPLWRFPNELPIAGEPANIVALVEEYMDWLHQSPVPKLLFWGTPGVLIPPAEAARLAKSLPNCKAVDIGPGLNLLQEDNPDLIGSEIARWLSTLEISG

SEQ ID NO: 1439 - protein, 277 aa, Synthetic construct
MFHYVDVGPRDGTPVLFLHGNPTSSYVWRNIIPHVAPTHRCIIPDLIGMGKSDKPDLGYFFDDHVRFMDAFIEALGLEEVVLVIHDWGSALGFHWAKRNPERVKGIAFMEFIRPIPTWDEWPEFARETFQAFRTTDVGRKLIIDQNVFIEGTLPMGVVRPLTEVEMDHYREPFLNPVDREPLWRFPNELPIAGEPANIVALVEEYMDWLHQSPVPKLLFWGTPGVLIPPAEAARLAKSLPNCKAVDIGPGLNLLQEDNPDLIGSEIARWLSTLEISG

SEQ ID NO: 1440 - protein, 277 aa, Synthetic construct
MFHYVDVGPRDGTPVLFLHGNPTSSYVWRNIIPHVAPTHRCIAVDLIGMGKSDKPDLGYFFDDHVRFMDAFIEALGLEEVVLVIHDWGSALGFHWAKRNPERVKGIAFMEFIRPIPTWDEWPEFARETFQAFRTTDVGRKLIIDQNVFIEGTLPMGVVRPLTEVEMDHYREPFLNPVDREPLWRFPNELPIAGEPANIVALVEEYMDWLHQSPVPKLLFWGTPGVLIPPAEAARLAKSLPNCKAVDIGPGLNLLQEDNPDLIGSEIARWLSTLEISG

SEQ ID NO: 1441 - protein, 277 aa, Synthetic construct
MFHYVDVGPRDGTPVLFLHGNPTSSYVWRNIIPHVAPTHRCIALDLIGMGKSDKPDLGYFFDDHVRFMDAFIEALGLEEVVLVIHDWGSALGFHWAKRNPERVKGIAFMEFIRPIPTWDEWPEFARETFQAFRTTDVGRKLIIDQNVFIEGTLPMGVVRPLTEVEMDHYREPFLNPVDREPLWRFPNELPIAGEPANIVALVEEYMDWLHQSPVPKLLFWGTPGVLIPPAEAARLAKSLPNCKAVDIGPGLNLLQEDNPDLIGSEIARWLSTLEISG

SEQ ID NO: 1442 - protein, 277 aa, Synthetic construct
MFHYVDVGPRDGTPVLFLHGNPTSSYVWRNIIPHVAPTHRCIAADLIGMGKSDKPDLGYFFDDHVRFMDAFIEALGLEEVVLVIHDWGSALGFHWAKRNPERVKGIAFMEFIRPIPTWDEWPEFARETFQAFRTTDVGRKLIIDQNVFIEGTLPMGVVRPLTEVEMDHYREPFLNPVDREPLWRFPNELPIAGEPANIVALVEEYMDWLHQSPVPKLLFWGTPGVLIPPAEAARLAKSLPNCKAVDIGPGLNLLQEDNPDLIGSEIARWLSTLEISG

SEQ ID NO: 1443 - protein, 277 aa, Synthetic construct
MFHYVDVGPRDGTPVLFLHGNPTSSYVWRNIIPHVAPTHRCIAIDLIGMGKSDKPDLGYFFDDHVRFMDAFIEALGLEEVVLVIHDWGSALGFHWAKRNPERVKGIAFMEFIRPIPTWDEWPEFARETFQAFRTTDVGRKLIIDQNVFIEGTLPMGVVRPLTEVEMDHYREPFLNPVDREPLWRFPNELPIAGEPANIVALVEEYMDWLHQSPVPKLLFWGTPGVLIPPAEAARLAKSLPNCKAVDIGPGLNLLQEDNPDLIGSEIARWLSTLEISG

SEQ ID NO: 1444 - protein, 277 aa, Synthetic construct
MFHYVDVGPRDGTPVLFLHGNPTSSYVWRNIIPHVAPTHRCIACDLIGMGKSDKPDLGYFFDDHVRFMDAFIEALGLEEVVLVIHDWGSALGFHWAKRNPERVKGIAFMEFIRPIPTWDEWPEFARETFQAFRTTDVGRKLIIDQNVFIEGTLPMGVVRPLTEVEMDHYREPFLNPVDREPLWRFPNELPIAGEPANIVALVEEYMDWLHQSPVPKLLFWGTPGVLIPPAEAARLAKSLPNCKAVDIGPGLNLLQEDNPDLIGSEIARWLSTLEISG

SEQ ID NO: 1445 - protein, 277 aa, Synthetic construct
MFHYVDVGPRDGTPVLFLHGNPTSSYVWRNIIPHVAPTHRCIAMDLIGMGKSDKPDLGYFFDDHVRFMDAFIEALGLEEVVLVIHDWGSALGFHWAKRNPERVKGIAFMEFIRPIPTWDEWPEFARETFQAFRTTDVGRKLIIDQNVFIEGTLPMGVVRPLTEVEMDHYREPFLNPVDREPLWRFPNELPIAGEPANIVALVEEYMDWLHQSPVPKLLFWGTPGVLIPPAEAARLAKSLPNCKAVDIGPGLNLLQEDNPDLIGSEIARWLSTLEISG

SEQ ID NO: 1446 - protein, 277 aa, Synthetic construct
MFHYVDVGPRDGTPVLFLHGNPTSSYVWRNIIPHVAPTHRCIAPELIGMGKSDKPDLGYFFDDHVRFMDAFIEALGLEEVVLVIHDWGSALGFHWAKRNPERVKGIAFMEFIRPIPTWDEWPEFARETFQAFRTTDVGRKLIIDQNVFIEGTLPMGVVRPLTEVEMDHYREPFLNPVDREPLWRFPNELPIAGEPANIVALVEEYMDWLHQSPVPKLLFWGTPGVLIPPAEAARLAKSLPNCKAVDIGPGLNLLQEDNPDLIGSEIARWLSTLEISG

SEQ ID NO: 1447 - protein, 277 aa, Synthetic construct
MFHYVDVGPRDGTPVLFLHGNPTSSYVWRNIIPHVAPTHRCIAPNLIGMGKSDKPDLGYFFDDHVRFMDAFIEALGLEEVVLVIHDWGSALGFHWAKRNPERVKGIAFMEFIRPIPTWDEWPEFARETFQAFRTTDVGRKLIIDQNVFIEGTLPMGVVRPLTEVEMDHYREPFLNPVDREPLWRFPNELPIAGEPANIVALVEEYMDWLHQSPVPKLLFWGTPGVLIPPAEAARLAKSLPNCKAVDIGPGLNLLQEDNPDLIGSEIARWLSTLEISG

SEQ ID NO: 1448 - protein, 277 aa, Synthetic construct
MFHYVDVGPRDGTPVLFLHGNPTSSYVWRNIIPHVAPTHRCIAPGLIGMGKSDKPDLGYFFDDHVRFMDAFIEALGLEEVVLVIHDWGSALGFHWAKRNPERVKGIAFMEFIRPIPTWDEWPEFARETFQAFRTTDVGRKLIIDQNVFIEGTLPMGVVRPLTEVEMDHYREPFLNPVDREPLWRFPNELPIAGEPANIVALVEEYMDWLHQSPVPKLLFWGTPGVLIPPAEAARLAKSLPNCKAVDIGPGLNLLQEDNPDLIGSEIARWLSTLEISG

SEQ ID NO: 1449 - protein, 277 aa, Synthetic construct
MFHYVDVGPRDGTPVLFLHGNPTSSYVWRNIIPHVAPTHRCIAPTLIGMGKSDKPDLGYFFDDHVRFMDAFIEALGLEEVVLVIHDWGSALGFHWAKRNPERVKGIAFMEFIRPIPTWDEWPEFARETFQAFRTTDVGRKLIIDQNVFIEGTLPMGVVRPLTEVEMDHYREPFLNPVDREPLWRFPNELPIAGEPANIVALVEEYMDWLHQSPVPKLLFWGTPGVLIPPAEAARLAKSLPNCKAVDIGPGLNLLQEDNPDLIGSEIARWLSTLEISG

SEQ ID NO: 1450 - protein, 277 aa, Synthetic construct
MFHYVDVGPRDGTPVLFLHGNPTSSYVWRNIIPHVAPTHRCIAPSLIGMGKSDKPDLGYFFDDHVRFMDAFIEALGLEEVVLVIHDWGSALGFHWAKRNPERVKGIAFMEFIRPIPTWDEWPEFARETFQAFRTTDVGRKLIIDQNVFIEGTLPMGVVRPLTEVEMDHYREPFLNPVDREPLWRFPNELPIAGEPANIVALVEEYMDWLHQSPVPKLLFWGTPGVLIPPAEAARLAKSLPNCKAVDIGPGLNLLQEDNPDLIGSEIARWLSTLEISG

SEQ ID NO: 1451 - protein, 277 aa, Synthetic construct
MFHYVDVGPRDGTPVLFLHGNPTSSYVWRNIIPHVAPTHRCIAPALIGMGKSDKPDLGYFFDDHVRFMDAFIEALGLEEVVLVIHDWGSALGFHWAKRNPERVKGIAFMEFIRPIPTWDEWPEFARETFQAFRTTDVGRKLIIDQNVFIEGTLPMGVVRPLTEVEMDHYREPFLNPVDREPLWRFPNELPIAGEPANIVALVEEYMDWLHQSPVPKLLFWGTPGVLIPPAEAARLAKSLPNCKAVDIGPGLNLLQEDNPDLIGSEIARWLSTLEISG

SEQ ID NO: 1452 - protein, 277 aa, Synthetic construct
MFHYVDVGPRDGTPVLFLHGNPTSSYVWRNIIPHVAPTHRCIAPDMIGMGKSDKPDLGYFFDDHVRFMDAFIEALGLEEVVLVIHDWGSALGFHWAKRNPERVKGIAFMEFIRPIPTWDEWPEFARETFQAFRTTDVGRKLIIDQNVFIEGTLPMGVVRPLTEVEMDHYREPFLNPVDREPLWRFPNELPIAGEPANIVALVEEYMDWLHQSPVPKLLFWGTPGVLIPPAEAARLAKSLPNCKAVDIGPGLNLLQEDNPDLIGSEIARWLSTLEISG

SEQ ID NO: 1453 - protein, 277 aa, Synthetic construct
MFHYVDVGPRDGTPVLFLHGNPTSSYVWRNIIPHVAPTHRCIAPDHIGMGKSDKPDLGYFFDDHVRFMDAFIEALGLEEVVLVIHDWGSALGFHWAKRNPERVKGIAFMEFIRPIPTWDEWPEFARETFQAFRTTDVGRKLIIDQNVFIEGTLPMGVVRPLTEVEMDHYREPFLNPVDREPLWRFPNELPIAGEPANIVALVEEYMDWLHQSPVPKLLFWGTPGVLIPPAEAARLAKSLPNCKAVDIGPGLNLLQEDNPDLIGSEIARWLSTLEISG

SEQ ID NO: 1454 - protein, 277 aa, Synthetic construct
MFHYVDVGPRDGTPVLFLHGNPTSSYVWRNIIPHVAPTHRCIAPDFIGMGKSDKPDLGYFFDDHVRFMDAFIEALGLEEVVLVIHDWGSALGFHWAKRNPERVKGIAFMEFIRPIPTWDEWPEFARETFQAFRTTDVGRKLIIDQNVFIEGTLPMGVVRPLTEVEMDHYREPFLNPVDREPLWRFPNELPIAGEPANIVALVEEYMDWLHQSPVPKLLFWGTPGVLIPPAEAARLAKSLPNCKAVDIGPGLNLLQEDNPDLIGSEIARWLSTLEISG

SEQ ID NO: 1455 - protein, 277 aa, Synthetic construct
MFHYVDVGPRDGTPVLFLHGNPTSSYVWRNIIPHVAPTHRCIAPDQIGMGKSDKPDLGYFFDDHVRFMDAFIEALGLEEVVLVIHDWGSALGFHWAKRNPERVKGIAFMEFIRPIPTWDEWPEFARETFQAFRTTDVGRKLIIDQNVFIEGTLPMGVVRPLTEVEMDHYREPFLNPVDREPLWRFPNELPIAGEPANIVALVEEYMDWLHQSPVPKLLFWGTPGVLIPPAEAARLAKSLPNCKAVDIGPGLNLLQEDNPDLIGSEIARWLSTLEISG

SEQ ID NO: 1456 - protein, 277 aa, Synthetic construct
MFHYVDVGPRDGTPVLFLHGNPTSSYVWRNIIPHVAPTHRCIAPDIIGMGKSDKPDLGYFFDDHVRFMDAFIEALGLEEVVLVIHDWGSALGFHWAKRNPERVKGIAFMEFIRPIPTWDEWPEFARETFQAFRTTDVGRKLIIDQNVFIEGTLPMGVVRPLTEVEMDHYREPFLNPVDREPLWRFPNELPIAGEPANIVALVEEYMDWLHQSPVPKLLFWGTPGVLIPPAEAARLAKSLPNCKAVDIGPGLNLLQEDNPDLIGSEIARWLSTLEISG

SEQ ID NO: 1457 - protein, 277 aa, Synthetic construct
MFHYVDVGPRDGTPVLFLHGNPTSSYVWRNIIPHVAPTHRCIAPDYIGMGKSDKPDLGYFFDDHVRFMDAFIEALGLEEVVLVIHDWGSALGFHWAKRNPERVKGIAFMEFIRPIPTWDEWPEFARETFQAFRTTDVGRKLIIDQNVFIEGTLPMGVVRPLTEVEMDHYREPFLNPVDREPLWRFPNELPIAGEPANIVALVEEYMDWLHQSPVPKLLFWGTPGVLIPPAEAARLAKSLPNCKAVDIGPGLNLLQEDNPDLIGSEIARWLSTLEISG

SEQ ID NO: 1458 - protein, 277 aa, Synthetic construct
MFHYVDVGPRDGTPVLFLHGNPTSSYVWRNIIPHVAPTHRCIAPDLVGMGKSDKPDLGYFFDDHVRFMDAFIEALGLEEVVLVIHDWGSALGFHWAKRNPERVKGIAFMEFIRPIPTWDEWPEFARETFQAFRTTDVGRKLIIDQNVFIEGTLPMGVVRPLTEVEMDHYREPFLNPVDREPLWRFPNELPIAGEPANIVALVEEYMDWLHQSPVPKLLFWGTPGVLIPPAEAARLAKSLPNCKAVDIGPGLNLLQEDNPDLIGSEIARWLSTLEISG

SEQ ID NO: 1459 - protein, 277 aa, Synthetic construct
MFHYVDVGPRDGTPVLFLHGNPTSSYVWRNIIPHVAPTHRCIAPDLLGMGKSDKPDLGYFFDDHVRFMDAFIEALGLEEVVLVIHDWGSALGFHWAKRNPERVKGIAFMEFIRPIPTWDEWPEFARETFQAFRTTDVGRKLIIDQNVFIEGTLPMGVVRPLTEVEMDHYREPFLNPVDREPLWRFPNELPIAGEPANIVALVEEYMDWLHQSPVPKLLFWGTPGVLIPPAEAARLAKSLPNCKAVDIGPGLNLLQEDNPDLIGSEIARWLSTLEISG

SEQ ID NO: 1460 - protein, 277 aa, Synthetic construct
MFHYVDVGPRDGTPVLFLHGNPTSSYVWRNIIPHVAPTHRCIAPDLMGMGKSDKPDLGYFFDDHVRFMDAFIEALGLEEVVLVIHDWGSALGFHWAKRNPERVKGIAFMEFIRPIPTWDEWPEFARETFQAFRTTDVGRKLIIDQNVFIEGTLPMGVVRPLTEVEMDHYREPFLNPVDREPLWRFPNELPIAGEPANIVALVEEYMDWLHQSPVPKLLFWGTPGVLIPPAEAARLAKSLPNCKAVDIGPGLNLLQEDNPDLIGSEIARWLSTLEISG

SEQ ID NO: 1461 - protein, 277 aa, Synthetic construct
MFHYVDVGPRDGTPVLFLHGNPTSSYVWRNIIPHVAPTHRCIAPDLAGMGKSDKPDLGYFFDDHVRFMDAFIEALGLEEVVLVIHDWGSALGFHWAKRNPERVKGIAFMEFIRPIPTWDEWPEFARETFQAFRTTDVGRKLIIDQNVFIEGTLPMGVVRPLTEVEMDHYREPFLNPVDREPLWRFPNELPIAGEPANIVALVEEYMDWLHQSPVPKLLFWGTPGVLIPPAEAARLAKSLPNCKAVDIGPGLNLLQEDNPDLIGSEIARWLSTLEISG

SEQ ID NO: 1462 - protein, 277 aa, Synthetic construct
MFHYVDVGPRDGTPVLFLHGNPTSSYVWRNIIPHVAPTHRCIAPDLPGMGKSDKPDLGYFFDDHVRFMDAFIEALGLEEVVLVIHDWGSALGFHWAKRNPERVKGIAFMEFIRPIPTWDEWPEFARETFQAFRTTDVGRKLIIDQNVFIEGTLPMGVVRPLTEVEMDHYREPFLNPVDREPLWRFPNELPIAGEPANIVALVEEYMDWLHQSPVPKLLFWGTPGVLIPPAEAARLAKSLPNCKAVDIGPGLNLLQEDNPDLIGSEIARWLSTLEISG

SEQ ID NO: 1463 - protein, 277 aa, Synthetic construct
MFHYVDVGPRDGTPVLFLHGNPTSSYVWRNIIPHVAPTHRCIAPDLFGMGKSDKPDLGYFFDDHVRFMDAFIEALGLEEVVLVIHDWGSALGFHWAKRNPERVKGIAFMEFIRPIPTWDEWPEFARETFQAFRTTDVGRKLIIDQNVFIEGTLPMGVVRPLTEVEMDHYREPFLNPVDREPLWRFPNELPIAGEPANIVALVEEYMDWLHQSPVPKLLFWGTPGVLIPPAEAARLAKSLPNCKAVDIGPGLNLLQEDNPDLIGSEIARWLSTLEISG

SEQ ID NO: 1464 - protein, 277 aa, Synthetic construct
MFHYVDVGPRDGTPVLFLHGNPTSSYVWRNIIPHVAPTHRCIAPDLIAMGKSDKPDLGYFFDDHVRFMDAFIEALGLEEVVLVIHDWGSALGFHWAKRNPERVKGIAFMEFIRPIPTWDEWPEFARETFQAFRTTDVGRKLIIDQNVFIEGTLPMGVVRPLTEVEMDHYREPFLNPVDREPLWRFPNELPIAGEPANIVALVEEYMDWLHQSPVPKLLFWGTPGVLIPPAEAARLAKSLPNCKAVDIGPGLNLLQEDNPDLIGSEIARWLSTLEISG

SEQ ID NO: 1465 - protein, 277 aa, Synthetic construct
MFHYVDVGPRDGTPVLFLHGNPTSSYVWRNIIPHVAPTHRCIAPDLISMGKSDKPDLGYFFDDHVRFMDAFIEALGLEEVVLVIHDWGSALGFHWAKRNPERVKGIAFMEFIRPIPTWDEWPEFARETFQAFRTTDVGRKLIIDQNVFIEGTLPMGVVRPLTEVEMDHYREPFLNPVDREPLWRFPNELPIAGEPANIVALVEEYMDWLHQSPVPKLLFWGTPGVLIPPAEAARLAKSLPNCKAVDIGPGLNLLQEDNPDLIGSEIARWLSTLEISG

SEQ ID NO: 1466 - protein, 277 aa, Synthetic construct
MFHYVDVGPRDGTPVLFLHGNPTSSYVWRNIIPHVAPTHRCIAPDLINMGKSDKPDLGYFFDDHVRFMDAFIEALGLEEVVLVIHDWGSALGFHWAKRNPERVKGIAFMEFIRPIPTWDEWPEFARETFQAFRTTDVGRKLIIDQNVFIEGTLPMGVVRPLTEVEMDHYREPFLNPVDREPLWRFPNELPIAGEPANIVALVEEYMDWLHQSPVPKLLFWGTPGVLIPPAEAARLAKSLPNCKAVDIGPGLNLLQEDNPDLIGSEIARWLSTLEISG

SEQ ID NO: 1467 - protein, 277 aa, Synthetic construct
MFHYVDVGPRDGTPVLFLHGNPTSSYVWRNIIPHVAPTHRCIAPDLIDMGKSDKPDLGYFFDDHVRFMDAFIEALGLEEVVLVIHDWGSALGFHWAKRNPERVKGIAFMEFIRPIPTWDEWPEFARETFQAFRTTDVGRKLIIDQNVFIEGTLPMGVVRPLTEVEMDHYREPFLNPVDREPLWRFPNELPIAGEPANIVALVEEYMDWLHQSPVPKLLFWGTPGVLIPPAEAARLAKSLPNCKAVDIGPGLNLLQEDNPDLIGSEIARWLSTLEISG

SEQ ID NO: 1468 - protein, 277 aa, Synthetic construct
MFHYVDVGPRDGTPVLFLHGNPTSSYVWRNIIPHVAPTHRCIAPDLICMGKSDKPDLGYFFDDHVRFMDAFIEALGLEEVVLVIHDWGSALGFHWAKRNPERVKGIAFMEFIRPIPTWDEWPEFARETFQAFRTTDVGRKLIIDQNVFIEGTLPMGVVRPLTEVEMDHYREPFLNPVDREPLWRFPNELPIAGEPANIVALVEEYMDWLHQSPVPKLLFWGTPGVLIPPAEAARLAKSLPNCKAVDIGPGLNLLQEDNPDLIGSEIARWLSTLEISG

SEQ ID NO: 1469 - protein, 277 aa, Synthetic construct
MFHYVDVGPRDGTPVLFLHGNPTSSYVWRNIIPHVAPTHRCIAPDLIEMGKSDKPDLGYFFDDHVRFMDAFIEALGLEEVVLVIHDWGSALGFHWAKRNPERVKGIAFMEFIRPIPTWDEWPEFARETFQAFRTTDVGRKLIIDQNVFIEGTLPMGVVRPLTEVEMDHYREPFLNPVDREPLWRFPNELPIAGEPANIVALVEEYMDWLHQSPVPKLLFWGTPGVLIPPAEAARLAKSLPNCKAVDIGPGLNLLQEDNPDLIGSEIARWLSTLEISG

SEQ ID NO: 1470 - protein, 277 aa, Synthetic construct
MFHYVDVGPRDGTPVLFLHGNPTSSYVWRNIIPHVAPTHRCIAPDLIGFGKSDKPDLGYFFDDHVRFMDAFIEALGLEEVVLVIHDWGSALGFHWAKRNPERVKGIAFMEFIRPIPTWDEWPEFARETFQAFRTTDVGRKLIIDQNVFIEGTLPMGVVRPLTEVEMDHYREPFLNPVDREPLWRFPNELPIAGEPANIVALVEEYMDWLHQSPVPKLLFWGTPGVLIPPAEAARLAKSLPNCKAVDIGPGLNLLQEDNPDLIGSEIARWLSTLEISG

SEQ ID NO: 1471 - protein, 277 aa, Synthetic construct
MFHYVDVGPRDGTPVLFLHGNPTSSYVWRNIIPHVAPTHRCIAPDLIGYGKSDKPDLGYFFDDHVRFMDAFIEALGLEEVVLVIHDWGSALGFHWAKRNPERVKGIAFMEFIRPIPTWDEWPEFARETFQAFRTTDVGRKLIIDQNVFIEGTLPMGVVRPLTEVEMDHYREPFLNPVDREPLWRFPNELPIAGEPANIVALVEEYMDWLHQSPVPKLLFWGTPGVLIPPAEAARLAKSLPNCKAVDIGPGLNLLQEDNPDLIGSEIARWLSTLEISG

SEQ ID NO: 1472 - protein, 277 aa, Synthetic construct
MFHYVDVGPRDGTPVLFLHGNPTSSYVWRNIIPHVAPTHRCIAPDLIGLGKSDKPDLGYFFDDHVRFMDAFIEALGLEEVVLVIHDWGSALGFHWAKRNPERVKGIAFMEFIRPIPTWDEWPEFARETFQAFRTTDVGRKLIIDQNVFIEGTLPMGVVRPLTEVEMDHYREPFLNPVDREPLWRFPNELPIAGEPANIVALVEEYMDWLHQSPVPKLLFWGTPGVLIPPAEAARLAKSLPNCKAVDIGPGLNLLQEDNPDLIGSEIARWLSTLEISG

SEQ ID NO: 1473 - protein, 277 aa, Synthetic construct
MFHYVDVGPRDGTPVLFLHGNPTSSYVWRNIIPHVAPTHRCIAPDLIGCGKSDKPDLGYFFDDHVRFMDAFIEALGLEEVVLVIHDWGSALGFHWAKRNPERVKGIAFMEFIRPIPTWDEWPEFARETFQAFRTTDVGRKLIIDQNVFIEGTLPMGVVRPLTEVEMDHYREPFLNPVDREPLWRFPNELPIAGEPANIVALVEEYMDWLHQSPVPKLLFWGTPGVLIPPAEAARLAKSLPNCKAVDIGPGLNLLQEDNPDLIGSEIARWLSTLEISG

SEQ ID NO: 1474 - protein, 277 aa, Synthetic construct
MFHYVDVGPRDGTPVLFLHGNPTSSYVWRNIIPHVAPTHRCIAPDLIGAGKSDKPDLGYFFDDHVRFMDAFIEALGLEEVVLVIHDWGSALGFHWAKRNPERVKGIAFMEFIRPIPTWDEWPEFARETFQAFRTTDVGRKLIIDQNVFIEGTLPMGVVRPLTEVEMDHYREPFLNPVDREPLWRFPNELPIAGEPANIVALVEEYMDWLHQSPVPKLLFWGTPGVLIPPAEAARLAKSLPNCKAVDIGPGLNLLQEDNPDLIGSEIARWLSTLEISG

SEQ ID NO: 1475 - protein, 277 aa, Synthetic construct
MFHYVDVGPRDGTPVLFLHGNPTSSYVWRNIIPHVAPTHRCIAPDLIGQGKSDKPDLGYFFDDHVRFMDAFIEALGLEEVVLVIHDWGSALGFHWAKRNPERVKGIAFMEFIRPIPTWDEWPEFARETFQAFRTTDVGRKLIIDQNVFIEGTLPMGVVRPLTEVEMDHYREPFLNPVDREPLWRFPNELPIAGEPANIVALVEEYMDWLHQSPVPKLLFWGTPGVLIPPAEAARLAKSLPNCKAVDIGPGLNLLQEDNPDLIGSEIARWLSTLEISG

SEQ ID NO: 1476 - protein, 277 aa, Synthetic construct
MFHYVDVGPRDGTPVLFLHGNPTSSYVWRNIIPHVAPTHRCIAPDLIGMAKSDKPDLGYFFDDHVRFMDAFIEALGLEEVVLVIHDWGSALGFHWAKRNPERVKGIAFMEFIRPIPTWDEWPEFARETFQAFRTTDVGRKLIIDQNVFIEGTLPMGVVRPLTEVEMDHYREPFLNPVDREPLWRFPNELPIAGEPANIVALVEEYMDWLHQSPVPKLLFWGTPGVLIPPAEAARLAKSLPNCKAVDIGPGLNLLQEDNPDLIGSEIARWLSTLEISG

SEQ ID NO: 1477 - protein, 277 aa, Synthetic construct
MFHYVDVGPRDGTPVLFLHGNPTSSYVWRNIIPHVAPTHRCIAPDLIGMSKSDKPDLGYFFDDHVRFMDAFIEALGLEEVVLVIHDWGSALGFHWAKRNPERVKGIAFMEFIRPIPTWDEWPEFARETFQAFRTTDVGRKLIIDQNVFIEGTLPMGVVRPLTEVEMDHYREPFLNPVDREPLWRFPNELPIAGEPANIVALVEEYMDWLHQSPVPKLLFWGTPGVLIPPAEAARLAKSLPNCKAVDIGPGLNLLQEDNPDLIGSEIARWLSTLEISG

SEQ ID NO: 1478 - protein, 277 aa, Synthetic construct
MFHYVDVGPRDGTPVLFLHGNPTSSYVWRNIIPHVAPTHRCIAPDLIGMNKSDKPDLGYFFDDHVRFMDAFIEALGLEEVVLVIHDWGSALGFHWAKRNPERVKGIAFMEFIRPIPTWDEWPEFARETFQAFRTTDVGRKLIIDQNVFIEGTLPMGVVRPLTEVEMDHYREPFLNPVDREPLWRFPNELPIAGEPANIVALVEEYMDWLHQSPVPKLLFWGTPGVLIPPAEAARLAKSLPNCKAVDIGPGLNLLQEDNPDLIGSEIARWLSTLEISG

SEQ ID NO: 1479 - protein, 277 aa, Synthetic construct
MFHYVDVGPRDGTPVLFLHGNPTSSYVWRNIIPHVAPTHRCIAPDLIGMDKSDKPDLGYFFDDHVRFMDAFIEALGLEEVVLVIHDWGSALGFHWAKRNPERVKGIAFMEFIRPIPTWDEWPEFARETFQAFRTTDVGRKLIIDQNVFIEGTLPMGVVRPLTEVEMDHYREPFLNPVDREPLWRFPNELPIAGEPANIVALVEEYMDWLHQSPVPKLLFWGTPGVLIPPAEAARLAKSLPNCKAVDIGPGLNLLQEDNPDLIGSEIARWLSTLEISG

SEQ ID NO: 1480 - protein, 277 aa, Synthetic construct
MFHYVDVGPRDGTPVLFLHGNPTSSYVWRNIIPHVAPTHRCIAPDLIGMEKSDKPDLGYFFDDHVRFMDAFIEALGLEEVVLVIHDWGSALGFHWAKRNPERVKGIAFMEFIRPIPTWDEWPEFARETFQAFRTTDVGRKLIIDQNVFIEGTLPMGVVRPLTEVEMDHYREPFLNPVDREPLWRFPNELPIAGEPANIVALVEEYMDWLHQSPVPKLLFWGTPGVLIPPAEAARLAKSLPNCKAVDIGPGLNLLQEDNPDLIGSEIARWLSTLEISG

SEQ ID NO: 1481 - protein, 277 aa, Synthetic construct
MFHYVDVGPRDGTPVLFLHGNPTSSYVWRNIIPHVAPTHRCIAPDLIGMRKSDKPDLGYFFDDHVRFMDAFIEALGLEEVVLVIHDWGSALGFHWAKRNPERVKGIAFMEFIRPIPTWDEWPEFARETFQAFRTTDVGRKLIIDQNVFIEGTLPMGVVRPLTEVEMDHYREPFLNPVDREPLWRFPNELPIAGEPANIVALVEEYMDWLHQSPVPKLLFWGTPGVLIPPAEAARLAKSLPNCKAVDIGPGLNLLQEDNPDLIGSEIARWLSTLEISG

SEQ ID NO: 1482 - protein, 277 aa, Synthetic construct
MFHYVDVGPRDGTPVLFLHGNPTSSYVWRNIIPHVAPTHRCIAPDLIGMGRSDKPDLGYFFDDHVRFMDAFIEALGLEEVVLVIHDWGSALGFHWAKRNPERVKGIAFMEFIRPIPTWDEWPEFARETFQAFRTTDVGRKLIIDQNVFIEGTLPMGVVRPLTEVEMDHYREPFLNPVDREPLWRFPNELPIAGEPANIVALVEEYMDWLHQSPVPKLLFWGTPGVLIPPAEAARLAKSLPNCKAVDIGPGLNLLQEDNPDLIGSEIARWLSTLEISG

SEQ ID NO: 1483 - protein, 277 aa, Synthetic construct
MFHYVDVGPRDGTPVLFLHGNPTSSYVWRNIIPHVAPTHRCIAPDLIGMGQSDKPDLGYFFDDHVRFMDAFIEALGLEEVVLVIHDWGSALGFHWAKRNPERVKGIAFMEFIRPIPTWDEWPEFARETFQAFRTTDVGRKLIIDQNVFIEGTLPMGVVRPLTEVEMDHYREPFLNPVDREPLWRFPNELPIAGEPANIVALVEEYMDWLHQSPVPKLLFWGTPGVLIPPAEAARLAKSLPNCKAVDIGPGLNLLQEDNPDLIGSEIARWLSTLEISG

SEQ ID NO: 1484 - protein, 277 aa, Synthetic construct
MFHYVDVGPRDGTPVLFLHGNPTSSYVWRNIIPHVAPTHRCIAPDLIGMGDSDKPDLGYFFDDHVRFMDAFIEALGLEEVVLVIHDWGSALGFHWAKRNPERVKGIAFMEFIRPIPTWDEWPEFARETFQAFRTTDVGRKLIIDQNVFIEGTLPMGVVRPLTEVEMDHYREPFLNPVDREPLWRFPNELPIAGEPANIVALVEEYMDWLHQSPVPKLLFWGTPGVLIPPAEAARLAKSLPNCKAVDIGPGLNLLQEDNPDLIGSEIARWLSTLEISG

SEQ ID NO: 1485 - protein, 277 aa, Synthetic construct
MFHYVDVGPRDGTPVLFLHGNPTSSYVWRNIIPHVAPTHRCIAPDLIGMGESDKPDLGYFFDDHVRFMDAFIEALGLEEVVLVIHDWGSALGFHWAKRNPERVKGIAFMEFIRPIPTWDEWPEFARETFQAFRTTDVGRKLIIDQNVFIEGTLPMGVVRPLTEVEMDHYREPFLNPVDREPLWRFPNELPIAGEPANIVALVEEYMDWLHQSPVPKLLFWGTPGVLIPPAEAARLAKSLPNCKAVDIGPGLNLLQEDNPDLIGSEIARWLSTLEISG

SEQ ID NO: 1486 - protein, 277 aa, Synthetic construct
MFHYVDVGPRDGTPVLFLHGNPTSSYVWRNIIPHVAPTHRCIAPDLIGMGASDKPDLGYFFDDHVRFMDAFIEALGLEEVVLVIHDWGSALGFHWAKRNPERVKGIAFMEFIRPIPTWDEWPEFARETFQAFRTTDVGRKLIIDQNVFIEGTLPMGVVRPLTEVEMDHYREPFLNPVDREPLWRFPNELPIAGEPANIVALVEEYMDWLHQSPVPKLLFWGTPGVLIPPAEAARLAKSLPNCKAVDIGPGLNLLQEDNPDLIGSEIARWLSTLEISG

SEQ ID NO: 1487 - protein, 277 aa, Synthetic construct
MFHYVDVGPRDGTPVLFLHGNPTSSYVWRNIIPHVAPTHRCIAPDLIGMGLSDKPDLGYFFDDHVRFMDAFIEALGLEEVVLVIHDWGSALGFHWAKRNPERVKGIAFMEFIRPIPTWDEWPEFARETFQAFRTTDVGRKLIIDQNVFIEGTLPMGVVRPLTEVEMDHYREPFLNPVDREPLWRFPNELPIAGEPANIVALVEEYMDWLHQSPVPKLLFWGTPGVLIPPAEAARLAKSLPNCKAVDIGPGLNLLQEDNPDLIGSEIARWLSTLEISG

SEQ ID NO: 1488 - protein, 277 aa, Synthetic construct
MFHYVDVGPRDGTPVLFLHGNPTSSYVWRNIIPHVAPTHRCIAPDLIGMGKTDKPDLGYFFDDHVRFMDAFIEALGLEEVVLVIHDWGSALGFHWAKRNPERVKGIAFMEFIRPIPTWDEWPEFARETFQAFRTTDVGRKLIIDQNVFIEGTLPMGVVRPLTEVEMDHYREPFLNPVDREPLWRFPNELPIAGEPANIVALVEEYMDWLHQSPVPKLLFWGTPGVLIPPAEAARLAKSLPNCKAVDIGPGLNLLQEDNPDLIGSEIARWLSTLEISG

SEQ ID NO: 1489 - protein, 277 aa, Synthetic construct
MFHYVDVGPRDGTPVLFLHGNPTSSYVWRNIIPHVAPTHRCIAPDLIGMGKADKPDLGYFFDDHVRFMDAFIEALGLEEVVLVIHDWGSALGFHWAKRNPERVKGIAFMEFIRPIPTWDEWPEFARETFQAFRTTDVGRKLIIDQNVFIEGTLPMGVVRPLTEVEMDHYREPFLNPVDREPLWRFPNELPIAGEPANIVALVEEYMDWLHQSPVPKLLFWGTPGVLIPPAEAARLAKSLPNCKAVDIGPGLNLLQEDNPDLIGSEIARWLSTLEISG

SEQ ID NO: 1490 - protein, 277 aa, Synthetic construct
MFHYVDVGPRDGTPVLFLHGNPTSSYVWRNIIPHVAPTHRCIAPDLIGMGKGDKPDLGYFFDDHVRFMDAFIEALGLEEVVLVIHDWGSALGFHWAKRNPERVKGIAFMEFIRPIPTWDEWPEFARETFQAFRTTDVGRKLIIDQNVFIEGTLPMGVVRPLTEVEMDHYREPFLNPVDREPLWRFPNELPIAGEPANIVALVEEYMDWLHQSPVPKLLFWGTPGVLIPPAEAARLAKSLPNCKAVDIGPGLNLLQEDNPDLIGSEIARWLSTLEISG

SEQ ID NO: 1491 - protein, 277 aa, Synthetic construct
MFHYVDVGPRDGTPVLFLHGNPTSSYVWRNIIPHVAPTHRCIAPDLIGMGKNDKPDLGYFFDDHVRFMDAFIEALGLEEVVLVIHDWGSALGFHWAKRNPERVKGIAFMEFIRPIPTWDEWPEFARETFQAFRTTDVGRKLIIDQNVFIEGTLPMGVVRPLTEVEMDHYREPFLNPVDREPLWRFPNELPIAGEPANIVALVEEYMDWLHQSPVPKLLFWGTPGVLIPPAEAARLAKSLPNCKAVDIGPGLNLLQEDNPDLIGSEIARWLSTLEISG

SEQ ID NO: 1492 - protein, 277 aa, Synthetic construct
MFHYVDVGPRDGTPVLFLHGNPTSSYVWRNIIPHVAPTHRCIAPDLIGMGKCDKPDLGYFFDDHVRFMDAFIEALGLEEVVLVIHDWGSALGFHWAKRNPERVKGIAFMEFIRPIPTWDEWPEFARETFQAFRTTDVGRKLIIDQNVFIEGTLPMGVVRPLTEVEMDHYREPFLNPVDREPLWRFPNELPIAGEPANIVALVEEYMDWLHQSPVPKLLFWGTPGVLIPPAEAARLAKSLPNCKAVDIGPGLNLLQEDNPDLIGSEIARWLSTLEISG

SEQ ID NO: 1493 - protein, 277 aa, Synthetic construct
MFHYVDVGPRDGTPVLFLHGNPTSSYVWRNIIPHVAPTHRCIAPDLIGMGKPDKPDLGYFFDDHVRFMDAFIEALGLEEVVLVIHDWGSALGFHWAKRNPERVKGIAFMEFIRPIPTWDEWPEFARETFQAFRTTDVGRKLIIDQNVFIEGTLPMGVVRPLTEVEMDHYREPFLNPVDREPLWRFPNELPIAGEPANIVALVEEYMDWLHQSPVPKLLFWGTPGVLIPPAEAARLAKSLPNCKAVDIGPGLNLLQEDNPDLIGSEIARWLSTLEISG

SEQ ID NO: 1494 - protein, 277 aa, Synthetic construct
MFHYVDVGPRDGTPVLFLHGNPTSSYVWRNIIPHVAPTHRCIAPDLIGMGKSGKPDLGYFFDDHVRFMDAFIEALGLEEVVLVIHDWGSALGFHWAKRNPERVKGIAFMEFIRPIPTWDEWPEFARETFQAFRTTDVGRKLIIDQNVFIEGTLPMGVVRPLTEVEMDHYREPFLNPVDREPLWRFPNELPIAGEPANIVALVEEYMDWLHQSPVPKLLFWGTPGVLIPPAEAARLAKSLPNCKAVDIGPGLNLLQEDNPDLIGSEIARWLSTLEISG

SEQ ID NO: 1495 - protein, 277 aa, Synthetic construct
MFHYVDVGPRDGTPVLFLHGNPTSSYVWRNIIPHVAPTHRCIAPDLIGMGKSEKPDLGYFFDDHVRFMDAFIEALGLEEVVLVIHDWGSALGFHWAKRNPERVKGIAFMEFIRPIPTWDEWPEFARETFQAFRTTDVGRKLIIDQNVFIEGTLPMGVVRPLTEVEMDHYREPFLNPVDREPLWRFPNELPIAGEPANIVALVEEYMDWLHQSPVPKLLFWGTPGVLIPPAEAARLAKSLPNCKAVDIGPGLNLLQEDNPDLIGSEIARWLSTLEISG

SEQ ID NO: 1496 - protein, 277 aa, Synthetic construct
MFHYVDVGPRDGTPVLFLHGNPTSSYVWRNIIPHVAPTHRCIAPDLIGMGKSSKPDLGYFFDDHVRFMDAFIEALGLEEVVLVIHDWGSALGFHWAKRNPERVKGIAFMEFIRPIPTWDEWPEFARETFQAFRTTDVGRKLIIDQNVFIEGTLPMGVVRPLTEVEMDHYREPFLNPVDREPLWRFPNELPIAGEPANIVALVEEYMDWLHQSPVPKLLFWGTPGVLIPPAEAARLAKSLPNCKAVDIGPGLNLLQEDNPDLIGSEIARWLSTLEISG

SEQ ID NO: 1497 - protein, 277 aa, Synthetic construct
MFHYVDVGPRDGTPVLFLHGNPTSSYVWRNIIPHVAPTHRCIAPDLIGMGKSAKPDLGYFFDDHVRFMDAFIEALGLEEVVLVIHDWGSALGFHWAKRNPERVKGIAFMEFIRPIPTWDEWPEFARETFQAFRTTDVGRKLIIDQNVFIEGTLPMGVVRPLTEVEMDHYREPFLNPVDREPLWRFPNELPIAGEPANIVALVEEYMDWLHQSPVPKLLFWGTPGVLIPPAEAARLAKSLPNCKAVDIGPGLNLLQEDNPDLIGSEIARWLSTLEISG

SEQ ID NO: 1498 - protein, 277 aa, Synthetic construct
MFHYVDVGPRDGTPVLFLHGNPTSSYVWRNIIPHVAPTHRCIAPDLIGMGKSQKPDLGYFFDDHVRFMDAFIEALGLEEVVLVIHDWGSALGFHWAKRNPERVKGIAFMEFIRPIPTWDEWPEFARETFQAFRTTDVGRKLIIDQNVFIEGTLPMGVVRPLTEVEMDHYREPFLNPVDREPLWRFPNELPIAGEPANIVALVEEYMDWLHQSPVPKLLFWGTPGVLIPPAEAARLAKSLPNCKAVDIGPGLNLLQEDNPDLIGSEIARWLSTLEISG

SEQ ID NO: 1499 - protein, 277 aa, Synthetic construct
MFHYVDVGPRDGTPVLFLHGNPTSSYVWRNIIPHVAPTHRCIAPDLIGMGKSTKPDLGYFFDDHVRFMDAFIEALGLEEVVLVIHDWGSALGFHWAKRNPERVKGIAFMEFIRPIPTWDEWPEFARETFQAFRTTDVGRKLIIDQNVFIEGTLPMGVVRPLTEVEMDHYREPFLNPVDREPLWRFPNELPIAGEPANIVALVEEYMDWLHQSPVPKLLFWGTPGVLIPPAEAARLAKSLPNCKAVDIGPGLNLLQEDNPDLIGSEIARWLSTLEISG

SEQ ID NO: 1500 - protein, 277 aa, Synthetic construct
MFHYVDVGPRDGTPVLFLHGNPTSSYVWRNIIPHVAPTHRCIAPDLIGMGKSDRPDLGYFFDDHVRFMDAFIEALGLEEVVLVIHDWGSALGFHWAKRNPERVKGIAFMEFIRPIPTWDEWPEFARETFQAFRTTDVGRKLIIDQNVFIEGTLPMGVVRPLTEVEMDHYREPFLNPVDREPLWRFPNELPIAGEPANIVALVEEYMDWLHQSPVPKLLFWGTPGVLIPPAEAARLAKSLPNCKAVDIGPGLNLLQEDNPDLIGSEIARWLSTLEISG

SEQ ID NO: 1501 - protein, 277 aa, Synthetic construct
MFHYVDVGPRDGTPVLFLHGNPTSSYVWRNIIPHVAPTHRCIAPDLIGMGKSDAPDLGYFFDDHVRFMDAFIEALGLEEVVLVIHDWGSALGFHWAKRNPERVKGIAFMEFIRPIPTWDEWPEFARETFQAFRTTDVGRKLIIDQNVFIEGTLPMGVVRPLTEVEMDHYREPFLNPVDREPLWRFPNELPIAGEPANIVALVEEYMDWLHQSPVPKLLFWGTPGVLIPPAEAARLAKSLPNCKAVDIGPGLNLLQEDNPDLIGSEIARWLSTLEISG

SEQ ID NO: 1502 - protein, 277 aa, Synthetic construct
MFHYVDVGPRDGTPVLFLHGNPTSSYVWRNIIPHVAPTHRCIAPDLIGMGKSDTPDLGYFFDDHVRFMDAFIEALGLEEVVLVIHDWGSALGFHWAKRNPERVKGIAFMEFIRPIPTWDEWPEFARETFQAFRTTDVGRKLIIDQNVFIEGTLPMGVVRPLTEVEMDHYREPFLNPVDREPLWRFPNELPIAGEPANIVALVEEYMDWLHQSPVPKLLFWGTPGVLIPPAEAARLAKSLPNCKAVDIGPGLNLLQEDNPDLIGSEIARWLSTLEISG

SEQ ID NO: 1503 - protein, 277 aa, Synthetic construct
MFHYVDVGPRDGTPVLFLHGNPTSSYVWRNIIPHVAPTHRCIAPDLIGMGKSDQPDLGYFFDDHVRFMDAFIEALGLEEVVLVIHDWGSALGFHWAKRNPERVKGIAFMEFIRPIPTWDEWPEFARETFQAFRTTDVGRKLIIDQNVFIEGTLPMGVVRPLTEVEMDHYREPFLNPVDREPLWRFPNELPIAGEPANIVALVEEYMDWLHQSPVPKLLFWGTPGVLIPPAEAARLAKSLPNCKAVDIGPGLNLLQEDNPDLIGSEIARWLSTLEISG

SEQ ID NO: 1504 - protein, 277 aa, Synthetic construct
MFHYVDVGPRDGTPVLFLHGNPTSSYVWRNIIPHVAPTHRCIAPDLIGMGKSDSPDLGYFFDDHVRFMDAFIEALGLEEVVLVIHDWGSALGFHWAKRNPERVKGIAFMEFIRPIPTWDEWPEFARETFQAFRTTDVGRKLIIDQNVFIEGTLPMGVVRPLTEVEMDHYREPFLNPVDREPLWRFPNELPIAGEPANIVALVEEYMDWLHQSPVPKLLFWGTPGVLIPPAEAARLAKSLPNCKAVDIGPGLNLLQEDNPDLIGSEIARWLSTLEISG

SEQ ID NO: 1505 - protein, 277 aa, Synthetic construct
MFHYVDVGPRDGTPVLFLHGNPTSSYVWRNIIPHVAPTHRCIAPDLIGMGKSDHPDLGYFFDDHVRFMDAFIEALGLEEVVLVIHDWGSALGFHWAKRNPERVKGIAFMEFIRPIPTWDEWPEFARETFQAFRTTDVGRKLIIDQNVFIEGTLPMGVVRPLTEVEMDHYREPFLNPVDREPLWRFPNELPIAGEPANIVALVEEYMDWLHQSPVPKLLFWGTPGVLIPPAEAARLAKSLPNCKAVDIGPGLNLLQEDNPDLIGSEIARWLSTLEISG

SEQ ID NO: 1506 - protein, 277 aa, Synthetic construct
MFHYVDVGPRDGTPVLFLHGNPTSSYVWRNIIPHVAPTHRCIAPDLIGMGKSDKADLGYFFDDHVRFMDAFIEALGLEEVVLVIHDWGSALGFHWAKRNPERVKGIAFMEFIRPIPTWDEWPEFARETFQAFRTTDVGRKLIIDQNVFIEGTLPMGVVRPLTEVEMDHYREPFLNPVDREPLWRFPNELPIAGEPANIVALVEEYMDWLHQSPVPKLLFWGTPGVLIPPAEAARLAKSLPNCKAVDIGPGLNLLQEDNPDLIGSEIARWLSTLEISG

SEQ ID NO: 1507 - protein, 277 aa, Synthetic construct
MFHYVDVGPRDGTPVLFLHGNPTSSYVWRNIIPHVAPTHRCIAPDLIGMGKSDKTDLGYFFDDHVRFMDAFIEALGLEEVVLVIHDWGSALGFHWAKRNPERVKGIAFMEFIRPIPTWDEWPEFARETFQAFRTTDVGRKLIIDQNVFIEGTLPMGVVRPLTEVEMDHYREPFLNPVDREPLWRFPNELPIAGEPANIVALVEEYMDWLHQSPVPKLLFWGTPGVLIPPAEAARLAKSLPNCKAVDIGPGLNLLQEDNPDLIGSEIARWLSTLEISG

SEQ ID NO: 1508 - protein, 277 aa, Synthetic construct
MFHYVDVGPRDGTPVLFLHGNPTSSYVWRNIIPHVAPTHRCIAPDLIGMGKSDKLDLGYFFDDHVRFMDAFIEALGLEEVVLVIHDWGSALGFHWAKRNPERVKGIAFMEFIRPIPTWDEWPEFARETFQAFRTTDVGRKLIIDQNVFIEGTLPMGVVRPLTEVEMDHYREPFLNPVDREPLWRFPNELPIAGEPANIVALVEEYMDWLHQSPVPKLLFWGTPGVLIPPAEAARLAKSLPNCKAVDIGPGLNLLQEDNPDLIGSEIARWLSTLEISG

SEQ ID NO: 1509 - protein, 277 aa, Synthetic construct
MFHYVDVGPRDGTPVLFLHGNPTSSYVWRNIIPHVAPTHRCIAPDLIGMGKSDKVDLGYFFDDHVRFMDAFIEALGLEEVVLVIHDWGSALGFHWAKRNPERVKGIAFMEFIRPIPTWDEWPEFARETFQAFRTTDVGRKLIIDQNVFIEGTLPMGVVRPLTEVEMDHYREPFLNPVDREPLWRFPNELPIAGEPANIVALVEEYMDWLHQSPVPKLLFWGTPGVLIPPAEAARLAKSLPNCKAVDIGPGLNLLQEDNPDLIGSEIARWLSTLEISG

SEQ ID NO: 1510 - protein, 277 aa, Synthetic construct
MFHYVDVGPRDGTPVLFLHGNPTSSYVWRNIIPHVAPTHRCIAPDLIGMGKSDKSDLGYFFDDHVRFMDAFIEALGLEEVVLVIHDWGSALGFHWAKRNPERVKGIAFMEFIRPIPTWDEWPEFARETFQAFRTTDVGRKLIIDQNVFIEGTLPMGVVRPLTEVEMDHYREPFLNPVDREPLWRFPNELPIAGEPANIVALVEEYMDWLHQSPVPKLLFWGTPGVLIPPAEAARLAKSLPNCKAVDIGPGLNLLQEDNPDLIGSEIARWLSTLEISG

SEQ ID NO: 1511 - protein, 277 aa, Synthetic construct
MFHYVDVGPRDGTPVLFLHGNPTSSYVWRNIIPHVAPTHRCIAPDLIGMGKSDKRDLGYFFDDHVRFMDAFIEALGLEEVVLVIHDWGSALGFHWAKRNPERVKGIAFMEFIRPIPTWDEWPEFARETFQAFRTTDVGRKLIIDQNVFIEGTLPMGVVRPLTEVEMDHYREPFLNPVDREPLWRFPNELPIAGEPANIVALVEEYMDWLHQSPVPKLLFWGTPGVLIPPAEAARLAKSLPNCKAVDIGPGLNLLQEDNPDLIGSEIARWLSTLEISG

SEQ ID NO: 1512 - protein, 277 aa, Synthetic construct
MFHYVDVGPRDGTPVLFLHGNPTSSYVWRNIIPHVAPTHRCIAPDLIGMGKSDKPELGYFFDDHVRFMDAFIEALGLEEVVLVIHDWGSALGFHWAKRNPERVKGIAFMEFIRPIPTWDEWPEFARETFQAFRTTDVGRKLIIDQNVFIEGTLPMGVVRPLTEVEMDHYREPFLNPVDREPLWRFPNELPIAGEPANIVALVEEYMDWLHQSPVPKLLFWGTPGVLIPPAEAARLAKSLPNCKAVDIGPGLNLLQEDNPDLIGSEIARWLSTLEISG

SEQ ID NO: 1513 - protein, 277 aa, Synthetic construct
MFHYVDVGPRDGTPVLFLHGNPTSSYVWRNIIPHVAPTHRCIAPDLIGMGKSDKPALGYFFDDHVRFMDAFIEALGLEEVVLVIHDWGSALGFHWAKRNPERVKGIAFMEFIRPIPTWDEWPEFARETFQAFRTTDVGRKLIIDQNVFIEGTLPMGVVRPLTEVEMDHYREPFLNPVDREPLWRFPNELPIAGEPANIVALVEEYMDWLHQSPVPKLLFWGTPGVLIPPAEAARLAKSLPNCKAVDIGPGLNLLQEDNPDLIGSEIARWLSTLEISG

SEQ ID NO: 1514 - protein, 277 aa, Synthetic construct
MFHYVDVGPRDGTPVLFLHGNPTSSYVWRNIIPHVAPTHRCIAPDLIGMGKSDKPSLGYFFDDHVRFMDAFIEALGLEEVVLVIHDWGSALGFHWAKRNPERVKGIAFMEFIRPIPTWDEWPEFARETFQAFRTTDVGRKLIIDQNVFIEGTLPMGVVRPLTEVEMDHYREPFLNPVDREPLWRFPNELPIAGEPANIVALVEEYMDWLHQSPVPKLLFWGTPGVLIPPAEAARLAKSLPNCKAVDIGPGLNLLQEDNPDLIGSEIARWLSTLEISG

SEQ ID NO: 1515 - protein, 277 aa, Synthetic construct
MFHYVDVGPRDGTPVLFLHGNPTSSYVWRNIIPHVAPTHRCIAPDLIGMGKSDKPNLGYFFDDHVRFMDAFIEALGLEEVVLVIHDWGSALGFHWAKRNPERVKGIAFMEFIRPIPTWDEWPEFARETFQAFRTTDVGRKLIIDQNVFIEGTLPMGVVRPLTEVEMDHYREPFLNPVDREPLWRFPNELPIAGEPANIVALVEEYMDWLHQSPVPKLLFWGTPGVLIPPAEAARLAKSLPNCKAVDIGPGLNLLQEDNPDLIGSEIARWLSTLEISG

SEQ ID NO: 1516 - protein, 277 aa, Synthetic construct
MFHYVDVGPRDGTPVLFLHGNPTSSYVWRNIIPHVAPTHRCIAPDLIGMGKSDKPGLGYFFDDHVRFMDAFIEALGLEEVVLVIHDWGSALGFHWAKRNPERVKGIAFMEFIRPIPTWDEWPEFARETFQAFRTTDVGRKLIIDQNVFIEGTLPMGVVRPLTEVEMDHYREPFLNPVDREPLWRFPNELPIAGEPANIVALVEEYMDWLHQSPVPKLLFWGTPGVLIPPAEAARLAKSLPNCKAVDIGPGLNLLQEDNPDLIGSEIARWLSTLEISG

SEQ ID NO: 1517 - protein, 277 aa, Synthetic construct
MFHYVDVGPRDGTPVLFLHGNPTSSYVWRNIIPHVAPTHRCIAPDLIGMGKSDKPPLGYFFDDHVRFMDAFIEALGLEEVVLVIHDWGSALGFHWAKRNPERVKGIAFMEFIRPIPTWDEWPEFARETFQAFRTTDVGRKLIIDQNVFIEGTLPMGVVRPLTEVEMDHYREPFLNPVDREPLWRFPNELPIAGEPANIVALVEEYMDWLHQSPVPKLLFWGTPGVLIPPAEAARLAKSLPNCKAVDIGPGLNLLQEDNPDLIGSEIARWLSTLEISG

SEQ ID NO: 1518 - protein, 277 aa, Synthetic construct
MFHYVDVGPRDGTPVLFLHGNPTSSYVWRNIIPHVAPTHRCIAPDLIGMGKSDKPDIGYFFDDHVRFMDAFIEALGLEEVVLVIHDWGSALGFHWAKRNPERVKGIAFMEFIRPIPTWDEWPEFARETFQAFRTTDVGRKLIIDQNVFIEGTLPMGVVRPLTEVEMDHYREPFLNPVDREPLWRFPNELPIAGEPANIVALVEEYMDWLHQSPVPKLLFWGTPGVLIPPAEAARLAKSLPNCKAVDIGPGLNLLQEDNPDLIGSEIARWLSTLEISG

SEQ ID NO: 1519 - protein, 277 aa, Synthetic construct
MFHYVDVGPRDGTPVLFLHGNPTSSYVWRNIIPHVAPTHRCIAPDLIGMGKSDKPDVGYFFDDHVRFMDAFIEALGLEEVVLVIHDWGSALGFHWAKRNPERVKGIAFMEFIRPIPTWDEWPEFARETFQAFRTTDVGRKLIIDQNVFIEGTLPMGVVRPLTEVEMDHYREPFLNPVDREPLWRFPNELPIAGEPANIVALVEEYMDWLHQSPVPKLLFWGTPGVLIPPAEAARLAKSLPNCKAVDIGPGLNLLQEDNPDLIGSEIARWLSTLEISG

SEQ ID NO: 1520 - protein, 277 aa, Synthetic construct
MFHYVDVGPRDGTPVLFLHGNPTSSYVWRNIIPHVAPTHRCIAPDLIGMGKSDKPDTGYFFDDHVRFMDAFIEALGLEEVVLVIHDWGSALGFHWAKRNPERVKGIAFMEFIRPIPTWDEWPEFARETFQAFRTTDVGRKLIIDQNVFIEGTLPMGVVRPLTEVEMDHYREPFLNPVDREPLWRFPNELPIAGEPANIVALVEEYMDWLHQSPVPKLLFWGTPGVLIPPAEAARLAKSLPNCKAVDIGPGLNLLQEDNPDLIGSEIARWLSTLEISG

SEQ ID NO: 1521 - protein, 277 aa, Synthetic construct
MFHYVDVGPRDGTPVLFLHGNPTSSYVWRNIIPHVAPTHRCIAPDLIGMGKSDKPDRGYFFDDHVRFMDAFIEALGLEEVVLVIHDWGSALGFHWAKRNPERVKGIAFMEFIRPIPTWDEWPEFARETFQAFRTTDVGRKLIIDQNVFIEGTLPMGVVRPLTEVEMDHYREPFLNPVDREPLWRFPNELPIAGEPANIVALVEEYMDWLHQSPVPKLLFWGTPGVLIPPAEAARLAKSLPNCKAVDIGPGLNLLQEDNPDLIGSEIARWLSTLEISG

SEQ ID NO: 1522 - protein, 277 aa, Synthetic construct
MFHYVDVGPRDGTPVLFLHGNPTSSYVWRNIIPHVAPTHRCIAPDLIGMGKSDKPDAGYFFDDHVRFMDAFIEALGLEEVVLVIHDWGSALGFHWAKRNPERVKGIAFMEFIRPIPTWDEWPEFARETFQAFRTTDVGRKLIIDQNVFIEGTLPMGVVRPLTEVEMDHYREPFLNPVDREPLWRFPNELPIAGEPANIVALVEEYMDWLHQSPVPKLLFWGTPGVLIPPAEAARLAKSLPNCKAVDIGPGLNLLQEDNPDLIGSEIARWLSTLEISG

SEQ ID NO: 1523 - protein, 277 aa, Synthetic construct
MFHYVDVGPRDGTPVLFLHGNPTSSYVWRNIIPHVAPTHRCIAPDLIGMGKSDKPDGGYFFDDHVRFMDAFIEALGLEEVVLVIHDWGSALGFHWAKRNPERVKGIAFMEFIRPIPTWDEWPEFARETFQAFRTTDVGRKLIIDQNVFIEGTLPMGVVRPLTEVEMDHYREPFLNPVDREPLWRFPNELPIAGEPANIVALVEEYMDWLHQSPVPKLLFWGTPGVLIPPAEAARLAKSLPNCKAVDIGPGLNLLQEDNPDLIGSEIARWLSTLEISG

SEQ ID NO: 1524 - protein, 277 aa, Synthetic construct
MFHYVDVGPRDGTPVLFLHGNPTSSYVWRNIIPHVAPTHRCIAPDLIGMGKSDKPDLAYFFDDHVRFMDAFIEALGLEEVVLVIHDWGSALGFHWAKRNPERVKGIAFMEFIRPIPTWDEWPEFARETFQAFRTTDVGRKLIIDQNVFIEGTLPMGVVRPLTEVEMDHYREPFLNPVDREPLWRFPNELPIAGEPANIVALVEEYMDWLHQSPVPKLLFWGTPGVLIPPAEAARLAKSLPNCKAVDIGPGLNLLQEDNPDLIGSEIARWLSTLEISG

SEQ ID NO: 1525 - protein, 277 aa, Synthetic construct
MFHYVDVGPRDGTPVLFLHGNPTSSYVWRNIIPHVAPTHRCIAPDLIGMGKSDKPDLPYFFDDHVRFMDAFIEALGLEEVVLVIHDWGSALGFHWAKRNPERVKGIAFMEFIRPIPTWDEWPEFARETFQAFRTTDVGRKLIIDQNVFIEGTLPMGVVRPLTEVEMDHYREPFLNPVDREPLWRFPNELPIAGEPANIVALVEEYMDWLHQSPVPKLLFWGTPGVLIPPAEAARLAKSLPNCKAVDIGPGLNLLQEDNPDLIGSEIARWLSTLEISG

SEQ ID NO: 1526 - protein, 277 aa, Synthetic construct
MFHYVDVGPRDGTPVLFLHGNPTSSYVWRNIIPHVAPTHRCIAPDLIGMGKSDKPDLSYFFDDHVRFMDAFIEALGLEEVVLVIHDWGSALGFHWAKRNPERVKGIAFMEFIRPIPTWDEWPEFARETFQAFRTTDVGRKLIIDQNVFIEGTLPMGVVRPLTEVEMDHYREPFLNPVDREPLWRFPNELPIAGEPANIVALVEEYMDWLHQSPVPKLLFWGTPGVLIPPAEAARLAKSLPNCKAVDIGPGLNLLQEDNPDLIGSEIARWLSTLEISG

SEQ ID NO: 1527 - protein, 277 aa, Synthetic construct
MFHYVDVGPRDGTPVLFLHGNPTSSYVWRNIIPHVAPTHRCIAPDLIGMGKSDKPDLDYFFDDHVRFMDAFIEALGLEEVVLVIHDWGSALGFHWAKRNPERVKGIAFMEFIRPIPTWDEWPEFARETFQAFRTTDVGRKLIIDQNVFIEGTLPMGVVRPLTEVEMDHYREPFLNPVDREPLWRFPNELPIAGEPANIVALVEEYMDWLHQSPVPKLLFWGTPGVLIPPAEAARLAKSLPNCKAVDIGPGLNLLQEDNPDLIGSEIARWLSTLEISG

SEQ ID NO: 1528 - protein, 277 aa, Synthetic construct
MFHYVDVGPRDGTPVLFLHGNPTSSYVWRNIIPHVAPTHRCIAPDLIGMGKSDKPDLEYFFDDHVRFMDAFIEALGLEEVVLVIHDWGSALGFHWAKRNPERVKGIAFMEFIRPIPTWDEWPEFARETFQAFRTTDVGRKLIIDQNVFIEGTLPMGVVRPLTEVEMDHYREPFLNPVDREPLWRFPNELPIAGEPANIVALVEEYMDWLHQSPVPKLLFWGTPGVLIPPAEAARLAKSLPNCKAVDIGPGLNLLQEDNPDLIGSEIARWLSTLEISG

SEQ ID NO: 1529 - protein, 277 aa, Synthetic construct
MFHYVDVGPRDGTPVLFLHGNPTSSYVWRNIIPHVAPTHRCIAPDLIGMGKSDKPDLTYFFDDHVRFMDAFIEALGLEEVVLVIHDWGSALGFHWAKRNPERVKGIAFMEFIRPIPTWDEWPEFARETFQAFRTTDVGRKLIIDQNVFIEGTLPMGVVRPLTEVEMDHYREPFLNPVDREPLWRFPNELPIAGEPANIVALVEEYMDWLHQSPVPKLLFWGTPGVLIPPAEAARLAKSLPNCKAVDIGPGLNLLQEDNPDLIGSEIARWLSTLEISG

SEQ ID NO: 1530 - protein, 277 aa, Synthetic construct
MFHYVDVGPRDGTPVLFLHGNPTSSYVWRNIIPHVAPTHRCIAPDLIGMGKSDKPDLGFFFDDHVRFMDAFIEALGLEEVVLVIHDWGSALGFHWAKRNPERVKGIAFMEFIRPIPTWDEWPEFARETFQAFRTTDVGRKLIIDQNVFIEGTLPMGVVRPLTEVEMDHYREPFLNPVDREPLWRFPNELPIAGEPANIVALVEEYMDWLHQSPVPKLLFWGTPGVLIPPAEAARLAKSLPNCKAVDIGPGLNLLQEDNPDLIGSEIARWLSTLEISG

SEQ ID NO: 1531 - protein, 277 aa, Synthetic construct
MFHYVDVGPRDGTPVLFLHGNPTSSYVWRNIIPHVAPTHRCIAPDLIGMGKSDKPDLGHFFDDHVRFMDAFIEALGLEEVVLVIHDWGSALGFHWAKRNPERVKGIAFMEFIRPIPTWDEWPEFARETFQAFRTTDVGRKLIIDQNVFIEGTLPMGVVRPLTEVEMDHYREPFLNPVDREPLWRFPNELPIAGEPANIVALVEEYMDWLHQSPVPKLLFWGTPGVLIPPAEAARLAKSLPNCKAVDIGPGLNLLQEDNPDLIGSEIARWLSTLEISG

SEQ ID NO: 1532 - protein, 277 aa, Synthetic construct
MFHYVDVGPRDGTPVLFLHGNPTSSYVWRNIIPHVAPTHRCIAPDLIGMGKSDKPDLGCFFDDHVRFMDAFIEALGLEEVVLVIHDWGSALGFHWAKRNPERVKGIAFMEFIRPIPTWDEWPEFARETFQAFRTTDVGRKLIIDQNVFIEGTLPMGVVRPLTEVEMDHYREPFLNPVDREPLWRFPNELPIAGEPANIVALVEEYMDWLHQSPVPKLLFWGTPGVLIPPAEAARLAKSLPNCKAVDIGPGLNLLQEDNPDLIGSEIARWLSTLEISG

SEQ ID NO: 1533 - protein, 277 aa, Synthetic construct
MFHYVDVGPRDGTPVLFLHGNPTSSYVWRNIIPHVAPTHRCIAPDLIGMGKSDKPDLGWFFDDHVRFMDAFIEALGLEEVVLVIHDWGSALGFHWAKRNPERVKGIAFMEFIRPIPTWDEWPEFARETFQAFRTTDVGRKLIIDQNVFIEGTLPMGVVRPLTEVEMDHYREPFLNPVDREPLWRFPNELPIAGEPANIVALVEEYMDWLHQSPVPKLLFWGTPGVLIPPAEAARLAKSLPNCKAVDIGPGLNLLQEDNPDLIGSEIARWLSTLEISG

SEQ ID NO: 1534 - protein, 277 aa, Synthetic construct
MFHYVDVGPRDGTPVLFLHGNPTSSYVWRNIIPHVAPTHRCIAPDLIGMGKSDKPDLGLFFDDHVRFMDAFIEALGLEEVVLVIHDWGSALGFHWAKRNPERVKGIAFMEFIRPIPTWDEWPEFARETFQAFRTTDVGRKLIIDQNVFIEGTLPMGVVRPLTEVEMDHYREPFLNPVDREPLWRFPNELPIAGEPANIVALVEEYMDWLHQSPVPKLLFWGTPGVLIPPAEAARLAKSLPNCKAVDIGPGLNLLQEDNPDLIGSEIARWLSTLEISG

SEQ ID NO: 1535 - protein, 277 aa, Synthetic construct
MFHYVDVGPRDGTPVLFLHGNPTSSYVWRNIIPHVAPTHRCIAPDLIGMGKSDKPDLGNFFDDHVRFMDAFIEALGLEEVVLVIHDWGSALGFHWAKRNPERVKGIAFMEFIRPIPTWDEWPEFARETFQAFRTTDVGRKLIIDQNVFIEGTLPMGVVRPLTEVEMDHYREPFLNPVDREPLWRFPNELPIAGEPANIVALVEEYMDWLHQSPVPKLLFWGTPGVLIPPAEAARLAKSLPNCKAVDIGPGLNLLQEDNPDLIGSEIARWLSTLEISG

SEQ ID NO: 1536 - protein, 277 aa, Synthetic construct
MFHYVDVGPRDGTPVLFLHGNPTSSYVWRNIIPHVAPTHRCIAPDLIGMGKSDKPDLGYRFDDHVRFMDAFIEALGLEEVVLVIHDWGSALGFHWAKRNPERVKGIAFMEFIRPIPTWDEWPEFARETFQAFRTTDVGRKLIIDQNVFIEGTLPMGVVRPLTEVEMDHYREPFLNPVDREPLWRFPNELPIAGEPANIVALVEEYMDWLHQSPVPKLLFWGTPGVLIPPAEAARLAKSLPNCKAVDIGPGLNLLQEDNPDLIGSEIARWLSTLEISG

SEQ ID NO: 1537 - protein, 277 aa, Synthetic construct
MFHYVDVGPRDGTPVLFLHGNPTSSYVWRNIIPHVAPTHRCIAPDLIGMGKSDKPDLGYTFDDHVRFMDAFIEALGLEEVVLVIHDWGSALGFHWAKRNPERVKGIAFMEFIRPIPTWDEWPEFARETFQAFRTTDVGRKLIIDQNVFIEGTLPMGVVRPLTEVEMDHYREPFLNPVDREPLWRFPNELPIAGEPANIVALVEEYMDWLHQSPVPKLLFWGTPGVLIPPAEAARLAKSLPNCKAVDIGPGLNLLQEDNPDLIGSEIARWLSTLEISG

SEQ ID NO: 1538 - protein, 277 aa, Synthetic construct
MFHYVDVGPRDGTPVLFLHGNPTSSYVWRNIIPHVAPTHRCIAPDLIGMGKSDKPDLGYSFDDHVRFMDAFIEALGLEEVVLVIHDWGSALGFHWAKRNPERVKGIAFMEFIRPIPTWDEWPEFARETFQAFRTTDVGRKLIIDQNVFIEGTLPMGVVRPLTEVEMDHYREPFLNPVDREPLWRFPNELPIAGEPANIVALVEEYMDWLHQSPVPKLLFWGTPGVLIPPAEAARLAKSLPNCKAVDIGPGLNLLQEDNPDLIGSEIARWLSTLEISG

SEQ ID NO: 1539 - protein, 277 aa, Synthetic construct
MFHYVDVGPRDGTPVLFLHGNPTSSYVWRNIIPHVAPTHRCIAPDLIGMGKSDKPDLGYAFDDHVRFMDAFIEALGLEEVVLVIHDWGSALGFHWAKRNPERVKGIAFMEFIRPIPTWDEWPEFARETFQAFRTTDVGRKLIIDQNVFIEGTLPMGVVRPLTEVEMDHYREPFLNPVDREPLWRFPNELPIAGEPANIVALVEEYMDWLHQSPVPKLLFWGTPGVLIPPAEAARLAKSLPNCKAVDIGPGLNLLQEDNPDLIGSEIARWLSTLEISG

SEQ ID NO: 1540 - protein, 277 aa, Synthetic construct
MFHYVDVGPRDGTPVLFLHGNPTSSYVWRNIIPHVAPTHRCIAPDLIGMGKSDKPDLGYKFDDHVRFMDAFIEALGLEEVVLVIHDWGSALGFHWAKRNPERVKGIAFMEFIRPIPTWDEWPEFARETFQAFRTTDVGRKLIIDQNVFIEGTLPMGVVRPLTEVEMDHYREPFLNPVDREPLWRFPNELPIAGEPANIVALVEEYMDWLHQSPVPKLLFWGTPGVLIPPAEAARLAKSLPNCKAVDIGPGLNLLQEDNPDLIGSEIARWLSTLEISG

SEQ ID NO: 1541 - protein, 277 aa, Synthetic construct
MFHYVDVGPRDGTPVLFLHGNPTSSYVWRNIIPHVAPTHRCIAPDLIGMGKSDKPDLGYVFDDHVRFMDAFIEALGLEEVVLVIHDWGSALGFHWAKRNPERVKGIAFMEFIRPIPTWDEWPEFARETFQAFRTTDVGRKLIIDQNVFIEGTLPMGVVRPLTEVEMDHYREPFLNPVDREPLWRFPNELPIAGEPANIVALVEEYMDWLHQSPVPKLLFWGTPGVLIPPAEAARLAKSLPNCKAVDIGPGLNLLQEDNPDLIGSEIARWLSTLEISG

SEQ ID NO: 1542 - protein, 277 aa, Synthetic construct
MFHYVDVGPRDGTPVLFLHGNPTSSYVWRNIIPHVAPTHRCIAPDLIGMGKSDKPDLGYFLDDHVRFMDAFIEALGLEEVVLVIHDWGSALGFHWAKRNPERVKGIAFMEFIRPIPTWDEWPEFARETFQAFRTTDVGRKLIIDQNVFIEGTLPMGVVRPLTEVEMDHYREPFLNPVDREPLWRFPNELPIAGEPANIVALVEEYMDWLHQSPVPKLLFWGTPGVLIPPAEAARLAKSLPNCKAVDIGPGLNLLQEDNPDLIGSEIARWLSTLEISG

SEQ ID NO: 1543 - protein, 277 aa, Synthetic construct
MFHYVDVGPRDGTPVLFLHGNPTSSYVWRNIIPHVAPTHRCIAPDLIGMGKSDKPDLGYFYDDHVRFMDAFIEALGLEEVVLVIHDWGSALGFHWAKRNPERVKGIAFMEFIRPIPTWDEWPEFARETFQAFRTTDVGRKLIIDQNVFIEGTLPMGVVRPLTEVEMDHYREPFLNPVDREPLWRFPNELPIAGEPANIVALVEEYMDWLHQSPVPKLLFWGTPGVLIPPAEAARLAKSLPNCKAVDIGPGLNLLQEDNPDLIGSEIARWLSTLEISG

SEQ ID NO: 1544 - protein, 277 aa, Synthetic construct
MFHYVDVGPRDGTPVLFLHGNPTSSYVWRNIIPHVAPTHRCIAPDLIGMGKSDKPDLGYFIDDHVRFMDAFIEALGLEEVVLVIHDWGSALGFHWAKRNPERVKGIAFMEFIRPIPTWDEWPEFARETFQAFRTTDVGRKLIIDQNVFIEGTLPMGVVRPLTEVEMDHYREPFLNPVDREPLWRFPNELPIAGEPANIVALVEEYMDWLHQSPVPKLLFWGTPGVLIPPAEAARLAKSLPNCKAVDIGPGLNLLQEDNPDLIGSEIARWLSTLEISG

SEQ ID NO: 1545 - protein, 277 aa, Synthetic construct
MFHYVDVGPRDGTPVLFLHGNPTSSYVWRNIIPHVAPTHRCIAPDLIGMGKSDKPDLGYFVDDHVRFMDAFIEALGLEEVVLVIHDWGSALGFHWAKRNPERVKGIAFMEFIRPIPTWDEWPEFARETFQAFRTTDVGRKLIIDQNVFIEGTLPMGVVRPLTEVEMDHYREPFLNPVDREPLWRFPNELPIAGEPANIVALVEEYMDWLHQSPVPKLLFWGTPGVLIPPAEAARLAKSLPNCKAVDIGPGLNLLQEDNPDLIGSEIARWLSTLEISG

SEQ ID NO: 1546 - protein, 277 aa, Synthetic construct
MFHYVDVGPRDGTPVLFLHGNPTSSYVWRNIIPHVAPTHRCIAPDLIGMGKSDKPDLGYFMDDHVRFMDAFIEALGLEEVVLVIHDWGSALGFHWAKRNPERVKGIAFMEFIRPIPTWDEWPEFARETFQAFRTTDVGRKLIIDQNVFIEGTLPMGVVRPLTEVEMDHYREPFLNPVDREPLWRFPNELPIAGEPANIVALVEEYMDWLHQSPVPKLLFWGTPGVLIPPAEAARLAKSLPNCKAVDIGPGLNLLQEDNPDLIGSEIARWLSTLEISG

SEQ ID NO: 1547 - protein, 277 aa, Synthetic construct
MFHYVDVGPRDGTPVLFLHGNPTSSYVWRNIIPHVAPTHRCIAPDLIGMGKSDKPDLGYFADDHVRFMDAFIEALGLEEVVLVIHDWGSALGFHWAKRNPERVKGIAFMEFIRPIPTWDEWPEFARETFQAFRTTDVGRKLIIDQNVFIEGTLPMGVVRPLTEVEMDHYREPFLNPVDREPLWRFPNELPIAGEPANIVALVEEYMDWLHQSPVPKLLFWGTPGVLIPPAEAARLAKSLPNCKAVDIGPGLNLLQEDNPDLIGSEIARWLSTLEISG

SEQ ID NO: 1548 - protein, 277 aa, Synthetic construct
MFHYVDVGPRDGTPVLFLHGNPTSSYVWRNIIPHVAPTHRCIAPDLIGMGKSDKPDLGYFFADHVRFMDAFIEALGLEEVVLVIHDWGSALGFHWAKRNPERVKGIAFMEFIRPIPTWDEWPEFARETFQAFRTTDVGRKLIIDQNVFIEGTLPMGVVRPLTEVEMDHYREPFLNPVDREPLWRFPNELPIAGEPANIVALVEEYMDWLHQSPVPKLLFWGTPGVLIPPAEAARLAKSLPNCKAVDIGPGLNLLQEDNPDLIGSEIARWLSTLEISG

SEQ ID NO: 1549 - protein, 277 aa, Synthetic construct
MFHYVDVGPRDGTPVLFLHGNPTSSYVWRNIIPHVAPTHRCIAPDLIGMGKSDKPDLGYFFEDHVRFMDAFIEALGLEEVVLVIHDWGSALGFHWAKRNPERVKGIAFMEFIRPIPTWDEWPEFARETFQAFRTTDVGRKLIIDQNVFIEGTLPMGVVRPLTEVEMDHYREPFLNPVDREPLWRFPNELPIAGEPANIVALVEEYMDWLHQSPVPKLLFWGTPGVLIPPAEAARLAKSLPNCKAVDIGPGLNLLQEDNPDLIGSEIARWLSTLEISG

SEQ ID NO: 1550 - protein, 277 aa, Synthetic construct
MFHYVDVGPRDGTPVLFLHGNPTSSYVWRNIIPHVAPTHRCIAPDLIGMGKSDKPDLGYFFVDHVRFMDAFIEALGLEEVVLVIHDWGSALGFHWAKRNPERVKGIAFMEFIRPIPTWDEWPEFARETFQAFRTTDVGRKLIIDQNVFIEGTLPMGVVRPLTEVEMDHYREPFLNPVDREPLWRFPNELPIAGEPANIVALVEEYMDWLHQSPVPKLLFWGTPGVLIPPAEAARLAKSLPNCKAVDIGPGLNLLQEDNPDLIGSEIARWLSTLEISG

SEQ ID NO: 1551 - protein, 277 aa, Synthetic construct
MFHYVDVGPRDGTPVLFLHGNPTSSYVWRNIIPHVAPTHRCIAPDLIGMGKSDKPDLGYFFFDHVRFMDAFIEALGLEEVVLVIHDWGSALGFHWAKRNPERVKGIAFMEFIRPIPTWDEWPEFARETFQAFRTTDVGRKLIIDQNVFIEGTLPMGVVRPLTEVEMDHYREPFLNPVDREPLWRFPNELPIAGEPANIVALVEEYMDWLHQSPVPKLLFWGTPGVLIPPAEAARLAKSLPNCKAVDIGPGLNLLQEDNPDLIGSEIARWLSTLEISG

SEQ ID NO: 1552 - protein, 277 aa, Synthetic construct
MFHYVDVGPRDGTPVLFLHGNPTSSYVWRNIIPHVAPTHRCIAPDLIGMGKSDKPDLGYFFLDHVRFMDAFIEALGLEEVVLVIHDWGSALGFHWAKRNPERVKGIAFMEFIRPIPTWDEWPEFARETFQAFRTTDVGRKLIIDQNVFIEGTLPMGVVRPLTEVEMDHYREPFLNPVDREPLWRFPNELPIAGEPANIVALVEEYMDWLHQSPVPKLLFWGTPGVLIPPAEAARLAKSLPNCKAVDIGPGLNLLQEDNPDLIGSEIARWLSTLEISG

SEQ ID NO: 1553 - protein, 277 aa, Synthetic construct
MFHYVDVGPRDGTPVLFLHGNPTSSYVWRNIIPHVAPTHRCIAPDLIGMGKSDKPDLGYFFTDHVRFMDAFIEALGLEEVVLVIHDWGSALGFHWAKRNPERVKGIAFMEFIRPIPTWDEWPEFARETFQAFRTTDVGRKLIIDQNVFIEGTLPMGVVRPLTEVEMDHYREPFLNPVDREPLWRFPNELPIAGEPANIVALVEEYMDWLHQSPVPKLLFWGTPGVLIPPAEAARLAKSLPNCKAVDIGPGLNLLQEDNPDLIGSEIARWLSTLEISG

SEQ ID NO: 1554 - protein, 277 aa, Synthetic construct
MFHYVDVGPRDGTPVLFLHGNPTSSYVWRNIIPHVAPTHRCIAPDLIGMGKSDKPDLGYFFDEHVRFMDAFIEALGLEEVVLVIHDWGSALGFHWAKRNPERVKGIAFMEFIRPIPTWDEWPEFARETFQAFRTTDVGRKLIIDQNVFIEGTLPMGVVRPLTEVEMDHYREPFLNPVDREPLWRFPNELPIAGEPANIVALVEEYMDWLHQSPVPKLLFWGTPGVLIPPAEAARLAKSLPNCKAVDIGPGLNLLQEDNPDLIGSEIARWLSTLEISG

SEQ ID NO: 1555 - protein, 277 aa, Synthetic construct
MFHYVDVGPRDGTPVLFLHGNPTSSYVWRNIIPHVAPTHRCIAPDLIGMGKSDKPDLGYFFDAHVRFMDAFIEALGLEEVVLVIHDWGSALGFHWAKRNPERVKGIAFMEFIRPIPTWDEWPEFARETFQAFRTTDVGRKLIIDQNVFIEGTLPMGVVRPLTEVEMDHYREPFLNPVDREPLWRFPNELPIAGEPANIVALVEEYMDWLHQSPVPKLLFWGTPGVLIPPAEAARLAKSLPNCKAVDIGPGLNLLQEDNPDLIGSEIARWLSTLEISG

SEQ ID NO: 1556 - protein, 277 aa, Synthetic construct
MFHYVDVGPRDGTPVLFLHGNPTSSYVWRNIIPHVAPTHRCIAPDLIGMGKSDKPDLGYFFDQHVRFMDAFIEALGLEEVVLVIHDWGSALGFHWAKRNPERVKGIAFMEFIRPIPTWDEWPEFARETFQAFRTTDVGRKLIIDQNVFIEGTLPMGVVRPLTEVEMDHYREPFLNPVDREPLWRFPNELPIAGEPANIVALVEEYMDWLHQSPVPKLLFWGTPGVLIPPAEAARLAKSLPNCKAVDIGPGLNLLQEDNPDLIGSEIARWLSTLEISG

SEQ ID NO: 1557 - protein, 277 aa, Synthetic construct
MFHYVDVGPRDGTPVLFLHGNPTSSYVWRNIIPHVAPTHRCIAPDLIGMGKSDKPDLGYFFDNHVRFMDAFIEALGLEEVVLVIHDWGSALGFHWAKRNPERVKGIAFMEFIRPIPTWDEWPEFARETFQAFRTTDVGRKLIIDQNVFIEGTLPMGVVRPLTEVEMDHYREPFLNPVDREPLWRFPNELPIAGEPANIVALVEEYMDWLHQSPVPKLLFWGTPGVLIPPAEAARLAKSLPNCKAVDIGPGLNLLQEDNPDLIGSEIARWLSTLEISG

SEQ ID NO: 1558 - protein, 277 aa, Synthetic construct
MFHYVDVGPRDGTPVLFLHGNPTSSYVWRNIIPHVAPTHRCIAPDLIGMGKSDKPDLGYFFDTHVRFMDAFIEALGLEEVVLVIHDWGSALGFHWAKRNPERVKGIAFMEFIRPIPTWDEWPEFARETFQAFRTTDVGRKLIIDQNVFIEGTLPMGVVRPLTEVEMDHYREPFLNPVDREPLWRFPNELPIAGEPANIVALVEEYMDWLHQSPVPKLLFWGTPGVLIPPAEAARLAKSLPNCKAVDIGPGLNLLQEDNPDLIGSEIARWLSTLEISG

SEQ ID NO: 1559 - protein, 277 aa, Synthetic construct
MFHYVDVGPRDGTPVLFLHGNPTSSYVWRNIIPHVAPTHRCIAPDLIGMGKSDKPDLGYFFDHHVRFMDAFIEALGLEEVVLVIHDWGSALGFHWAKRNPERVKGIAFMEFIRPIPTWDEWPEFARETFQAFRTTDVGRKLIIDQNVFIEGTLPMGVVRPLTEVEMDHYREPFLNPVDREPLWRFPNELPIAGEPANIVALVEEYMDWLHQSPVPKLLFWGTPGVLIPPAEAARLAKSLPNCKAVDIGPGLNLLQEDNPDLIGSEIARWLSTLEISG

SEQ ID NO: 1560 - protein, 277 aa, Synthetic construct
MFHYVDVGPRDGTPVLFLHGNPTSSYVWRNIIPHVAPTHRCIAPDLIGMGKSDKPDLGYFFDDQVRFMDAFIEALGLEEVVLVIHDWGSALGFHWAKRNPERVKGIAFMEFIRPIPTWDEWPEFARETFQAFRTTDVGRKLIIDQNVFIEGTLPMGVVRPLTEVEMDHYREPFLNPVDREPLWRFPNELPIAGEPANIVALVEEYMDWLHQSPVPKLLFWGTPGVLIPPAEAARLAKSLPNCKAVDIGPGLNLLQEDNPDLIGSEIARWLSTLEISG

SEQ ID NO: 1561 - protein, 277 aa, Synthetic construct
MFHYVDVGPRDGTPVLFLHGNPTSSYVWRNIIPHVAPTHRCIAPDLIGMGKSDKPDLGYFFDDNVRFMDAFIEALGLEEVVLVIHDWGSALGFHWAKRNPERVKGIAFMEFIRPIPTWDEWPEFARETFQAFRTTDVGRKLIIDQNVFIEGTLPMGVVRPLTEVEMDHYREPFLNPVDREPLWRFPNELPIAGEPANIVALVEEYMDWLHQSPVPKLLFWGTPGVLIPPAEAARLAKSLPNCKAVDIGPGLNLLQEDNPDLIGSEIARWLSTLEISG

SEQ ID NO: 1562 - protein, 277 aa, Synthetic construct
MFHYVDVGPRDGTPVLFLHGNPTSSYVWRNIIPHVAPTHRCIAPDLIGMGKSDKPDLGYFFDDYVRFMDAFIEALGLEEVVLVIHDWGSALGFHWAKRNPERVKGIAFMEFIRPIPTWDEWPEFARETFQAFRTTDVGRKLIIDQNVFIEGTLPMGVVRPLTEVEMDHYREPFLNPVDREPLWRFPNELPIAGEPANIVALVEEYMDWLHQSPVPKLLFWGTPGVLIPPAEAARLAKSLPNCKAVDIGPGLNLLQEDNPDLIGSEIARWLSTLEISG

SEQ ID NO: 1563 - protein, 277 aa, Synthetic construct
MFHYVDVGPRDGTPVLFLHGNPTSSYVWRNIIPHVAPTHRCIAPDLIGMGKSDKPDLGYFFDDRVRFMDAFIEALGLEEVVLVIHDWGSALGFHWAKRNPERVKGIAFMEFIRPIPTWDEWPEFARETFQAFRTTDVGRKLIIDQNVFIEGTLPMGVVRPLTEVEMDHYREPFLNPVDREPLWRFPNELPIAGEPANIVALVEEYMDWLHQSPVPKLLFWGTPGVLIPPAEAARLAKSLPNCKAVDIGPGLNLLQEDNPDLIGSEIARWLSTLEISG

SEQ ID NO: 1564 - protein, 277 aa, Synthetic construct
MFHYVDVGPRDGTPVLFLHGNPTSSYVWRNIIPHVAPTHRCIAPDLIGMGKSDKPDLGYFFDDAVRFMDAFIEALGLEEVVLVIHDWGSALGFHWAKRNPERVKGIAFMEFIRPIPTWDEWPEFARETFQAFRTTDVGRKLIIDQNVFIEGTLPMGVVRPLTEVEMDHYREPFLNPVDREPLWRFPNELPIAGEPANIVALVEEYMDWLHQSPVPKLLFWGTPGVLIPPAEAARLAKSLPNCKAVDIGPGLNLLQEDNPDLIGSEIARWLSTLEISG

SEQ ID NO: 1565 - protein, 277 aa, Synthetic construct
MFHYVDVGPRDGTPVLFLHGNPTSSYVWRNIIPHVAPTHRCIAPDLIGMGKSDKPDLGYFFDDSVRFMDAFIEALGLEEVVLVIHDWGSALGFHWAKRNPERVKGIAFMEFIRPIPTWDEWPEFARETFQAFRTTDVGRKLIIDQNVFIEGTLPMGVVRPLTEVEMDHYREPFLNPVDREPLWRFPNELPIAGEPANIVALVEEYMDWLHQSPVPKLLFWGTPGVLIPPAEAARLAKSLPNCKAVDIGPGLNLLQEDNPDLIGSEIARWLSTLEISG

SEQ ID NO: 1566 - protein, 277 aa, Synthetic construct
MFHYVDVGPRDGTPVLFLHGNPTSSYVWRNIIPHVAPTHRCIAPDLIGMGKSDKPDLGYFFDDHARFMDAFIEALGLEEVVLVIHDWGSALGFHWAKRNPERVKGIAFMEFIRPIPTWDEWPEFARETFQAFRTTDVGRKLIIDQNVFIEGTLPMGVVRPLTEVEMDHYREPFLNPVDREPLWRFPNELPIAGEPANIVALVEEYMDWLHQSPVPKLLFWGTPGVLIPPAEAARLAKSLPNCKAVDIGPGLNLLQEDNPDLIGSEIARWLSTLEISG

SEQ ID NO: 1567 - protein, 277 aa, Synthetic construct
MFHYVDVGPRDGTPVLFLHGNPTSSYVWRNIIPHVAPTHRCIAPDLIGMGKSDKPDLGYFFDDHSRFMDAFIEALGLEEVVLVIHDWGSALGFHWAKRNPERVKGIAFMEFIRPIPTWDEWPEFARETFQAFRTTDVGRKLIIDQNVFIEGTLPMGVVRPLTEVEMDHYREPFLNPVDREPLWRFPNELPIAGEPANIVALVEEYMDWLHQSPVPKLLFWGTPGVLIPPAEAARLAKSLPNCKAVDIGPGLNLLQEDNPDLIGSEIARWLSTLEISG

SEQ ID NO: 1568 - protein, 277 aa, Synthetic construct
MFHYVDVGPRDGTPVLFLHGNPTSSYVWRNIIPHVAPTHRCIAPDLIGMGKSDKPDLGYFFDDHIRFMDAFIEALGLEEVVLVIHDWGSALGFHWAKRNPERVKGIAFMEFIRPIPTWDEWPEFARETFQAFRTTDVGRKLIIDQNVFIEGTLPMGVVRPLTEVEMDHYREPFLNPVDREPLWRFPNELPIAGEPANIVALVEEYMDWLHQSPVPKLLFWGTPGVLIPPAEAARLAKSLPNCKAVDIGPGLNLLQEDNPDLIGSEIARWLSTLEISG

SEQ ID NO: 1569 - protein, 277 aa, Synthetic construct
MFHYVDVGPRDGTPVLFLHGNPTSSYVWRNIIPHVAPTHRCIAPDLIGMGKSDKPDLGYFFDDHTRFMDAFIEALGLEEVVLVIHDWGSALGFHWAKRNPERVKGIAFMEFIRPIPTWDEWPEFARETFQAFRTTDVGRKLIIDQNVFIEGTLPMGVVRPLTEVEMDHYREPFLNPVDREPLWRFPNELPIAGEPANIVALVEEYMDWLHQSPVPKLLFWGTPGVLIPPAEAARLAKSLPNCKAVDIGPGLNLLQEDNPDLIGSEIARWLSTLEISG

SEQ ID NO: 1570 - protein, 277 aa, Synthetic construct
MFHYVDVGPRDGTPVLFLHGNPTSSYVWRNIIPHVAPTHRCIAPDLIGMGKSDKPDLGYFFDDHRRFMDAFIEALGLEEVVLVIHDWGSALGFHWAKRNPERVKGIAFMEFIRPIPTWDEWPEFARETFQAFRTTDVGRKLIIDQNVFIEGTLPMGVVRPLTEVEMDHYREPFLNPVDREPLWRFPNELPIAGEPANIVALVEEYMDWLHQSPVPKLLFWGTPGVLIPPAEAARLAKSLPNCKAVDIGPGLNLLQEDNPDLIGSEIARWLSTLEISG

SEQ ID NO: 1571 - protein, 277 aa, Synthetic construct
MFHYVDVGPRDGTPVLFLHGNPTSSYVWRNIIPHVAPTHRCIAPDLIGMGKSDKPDLGYFFDDHGRFMDAFIEALGLEEVVLVIHDWGSALGFHWAKRNPERVKGIAFMEFIRPIPTWDEWPEFARETFQAFRTTDVGRKLIIDQNVFIEGTLPMGVVRPLTEVEMDHYREPFLNPVDREPLWRFPNELPIAGEPANIVALVEEYMDWLHQSPVPKLLFWGTPGVLIPPAEAARLAKSLPNCKAVDIGPGLNLLQEDNPDLIGSEIARWLSTLEISG

SEQ ID NO: 1572 - protein, 277 aa, Synthetic construct
MFHYVDVGPRDGTPVLFLHGNPTSSYVWRNIIPHVAPTHRCIAPDLIGMGKSDKPDLGYFFDDHVAFMDAFIEALGLEEVVLVIHDWGSALGFHWAKRNPERVKGIAFMEFIRPIPTWDEWPEFARETFQAFRTTDVGRKLIIDQNVFIEGTLPMGVVRPLTEVEMDHYREPFLNPVDREPLWRFPNELPIAGEPANIVALVEEYMDWLHQSPVPKLLFWGTPGVLIPPAEAARLAKSLPNCKAVDIGPGLNLLQEDNPDLIGSEIARWLSTLEISG

SEQ ID NO: 1573 - protein, 277 aa, Synthetic construct
MFHYVDVGPRDGTPVLFLHGNPTSSYVWRNIIPHVAPTHRCIAPDLIGMGKSDKPDLGYFFDDHVKFMDAFIEALGLEEVVLVIHDWGSALGFHWAKRNPERVKGIAFMEFIRPIPTWDEWPEFARETFQAFRTTDVGRKLIIDQNVFIEGTLPMGVVRPLTEVEMDHYREPFLNPVDREPLWRFPNELPIAGEPANIVALVEEYMDWLHQSPVPKLLFWGTPGVLIPPAEAARLAKSLPNCKAVDIGPGLNLLQEDNPDLIGSEIARWLSTLEISG

SEQ ID NO: 1574 - protein, 277 aa, Synthetic construct
MFHYVDVGPRDGTPVLFLHGNPTSSYVWRNIIPHVAPTHRCIAPDLIGMGKSDKPDLGYFFDDHVQFMDAFIEALGLEEVVLVIHDWGSALGFHWAKRNPERVKGIAFMEFIRPIPTWDEWPEFARETFQAFRTTDVGRKLIIDQNVFIEGTLPMGVVRPLTEVEMDHYREPFLNPVDREPLWRFPNELPIAGEPANIVALVEEYMDWLHQSPVPKLLFWGTPGVLIPPAEAARLAKSLPNCKAVDIGPGLNLLQEDNPDLIGSEIARWLSTLEISG

SEQ ID NO: 1575 - protein, 277 aa, Synthetic construct
MFHYVDVGPRDGTPVLFLHGNPTSSYVWRNIIPHVAPTHRCIAPDLIGMGKSDKPDLGYFFDDHVSFMDAFIEALGLEEVVLVIHDWGSALGFHWAKRNPERVKGIAFMEFIRPIPTWDEWPEFARETFQAFRTTDVGRKLIIDQNVFIEGTLPMGVVRPLTEVEMDHYREPFLNPVDREPLWRFPNELPIAGEPANIVALVEEYMDWLHQSPVPKLLFWGTPGVLIPPAEAARLAKSLPNCKAVDIGPGLNLLQEDNPDLIGSEIARWLSTLEISG

SEQ ID NO: 1576 - protein, 277 aa, Synthetic construct
MFHYVDVGPRDGTPVLFLHGNPTSSYVWRNIIPHVAPTHRCIAPDLIGMGKSDKPDLGYFFDDHVGFMDAFIEALGLEEVVLVIHDWGSALGFHWAKRNPERVKGIAFMEFIRPIPTWDEWPEFARETFQAFRTTDVGRKLIIDQNVFIEGTLPMGVVRPLTEVEMDHYREPFLNPVDREPLWRFPNELPIAGEPANIVALVEEYMDWLHQSPVPKLLFWGTPGVLIPPAEAARLAKSLPNCKAVDIGPGLNLLQEDNPDLIGSEIARWLSTLEISG

SEQ ID NO: 1577 - protein, 277 aa, Synthetic construct
MFHYVDVGPRDGTPVLFLHGNPTSSYVWRNIIPHVAPTHRCIAPDLIGMGKSDKPDLGYFFDDHVEFMDAFIEALGLEEVVLVIHDWGSALGFHWAKRNPERVKGIAFMEFIRPIPTWDEWPEFARETFQAFRTTDVGRKLIIDQNVFIEGTLPMGVVRPLTEVEMDHYREPFLNPVDREPLWRFPNELPIAGEPANIVALVEEYMDWLHQSPVPKLLFWGTPGVLIPPAEAARLAKSLPNCKAVDIGPGLNLLQEDNPDLIGSEIARWLSTLEISG

SEQ ID NO: 1578 - protein, 277 aa, Synthetic construct
MFHYVDVGPRDGTPVLFLHGNPTSSYVWRNIIPHVAPTHRCIAPDLIGMGKSDKPDLGYFFDDHVRYMDAFIEALGLEEVVLVIHDWGSALGFHWAKRNPERVKGIAFMEFIRPIPTWDEWPEFARETFQAFRTTDVGRKLIIDQNVFIEGTLPMGVVRPLTEVEMDHYREPFLNPVDREPLWRFPNELPIAGEPANIVALVEEYMDWLHQSPVPKLLFWGTPGVLIPPAEAARLAKSLPNCKAVDIGPGLNLLQEDNPDLIGSEIARWLSTLEISG

SEQ ID NO: 1579 - protein, 277 aa, Synthetic construct
MFHYVDVGPRDGTPVLFLHGNPTSSYVWRNIIPHVAPTHRCIAPDLIGMGKSDKPDLGYFFDDHVRHMDAFIEALGLEEVVLVIHDWGSALGFHWAKRNPERVKGIAFMEFIRPIPTWDEWPEFARETFQAFRTTDVGRKLIIDQNVFIEGTLPMGVVRPLTEVEMDHYREPFLNPVDREPLWRFPNELPIAGEPANIVALVEEYMDWLHQSPVPKLLFWGTPGVLIPPAEAARLAKSLPNCKAVDIGPGLNLLQEDNPDLIGSEIARWLSTLEISG

SEQ ID NO: 1580 - protein, 277 aa, Synthetic construct
MFHYVDVGPRDGTPVLFLHGNPTSSYVWRNIIPHVAPTHRCIAPDLIGMGKSDKPDLGYFFDDHVRWMDAFIEALGLEEVVLVIHDWGSALGFHWAKRNPERVKGIAFMEFIRPIPTWDEWPEFARETFQAFRTTDVGRKLIIDQNVFIEGTLPMGVVRPLTEVEMDHYREPFLNPVDREPLWRFPNELPIAGEPANIVALVEEYMDWLHQSPVPKLLFWGTPGVLIPPAEAARLAKSLPNCKAVDIGPGLNLLQEDNPDLIGSEIARWLSTLEISG

SEQ ID NO: 1581 - protein, 277 aa, Synthetic construct
MFHYVDVGPRDGTPVLFLHGNPTSSYVWRNIIPHVAPTHRCIAPDLIGMGKSDKPDLGYFFDDHVRNMDAFIEALGLEEVVLVIHDWGSALGFHWAKRNPERVKGIAFMEFIRPIPTWDEWPEFARETFQAFRTTDVGRKLIIDQNVFIEGTLPMGVVRPLTEVEMDHYREPFLNPVDREPLWRFPNELPIAGEPANIVALVEEYMDWLHQSPVPKLLFWGTPGVLIPPAEAARLAKSLPNCKAVDIGPGLNLLQEDNPDLIGSEIARWLSTLEISG

SEQ ID NO: 1582 - protein, 277 aa, Synthetic construct
MFHYVDVGPRDGTPVLFLHGNPTSSYVWRNIIPHVAPTHRCIAPDLIGMGKSDKPDLGYFFDDHVRAMDAFIEALGLEEVVLVIHDWGSALGFHWAKRNPERVKGIAFMEFIRPIPTWDEWPEFARETFQAFRTTDVGRKLIIDQNVFIEGTLPMGVVRPLTEVEMDHYREPFLNPVDREPLWRFPNELPIAGEPANIVALVEEYMDWLHQSPVPKLLFWGTPGVLIPPAEAARLAKSLPNCKAVDIGPGLNLLQEDNPDLIGSEIARWLSTLEISG

SEQ ID NO: 1583 - protein, 277 aa, Synthetic construct
MFHYVDVGPRDGTPVLFLHGNPTSSYVWRNIIPHVAPTHRCIAPDLIGMGKSDKPDLGYFFDDHVRCMDAFIEALGLEEVVLVIHDWGSALGFHWAKRNPERVKGIAFMEFIRPIPTWDEWPEFARETFQAFRTTDVGRKLIIDQNVFIEGTLPMGVVRPLTEVEMDHYREPFLNPVDREPLWRFPNELPIAGEPANIVALVEEYMDWLHQSPVPKLLFWGTPGVLIPPAEAARLAKSLPNCKAVDIGPGLNLLQEDNPDLIGSEIARWLSTLEISG

SEQ ID NO: 1584 - protein, 277 aa, Synthetic construct
MFHYVDVGPRDGTPVLFLHGNPTSSYVWRNIIPHVAPTHRCIAPDLIGMGKSDKPDLGYFFDDHVRFLDAFIEALGLEEVVLVIHDWGSALGFHWAKRNPERVKGIAFMEFIRPIPTWDEWPEFARETFQAFRTTDVGRKLIIDQNVFIEGTLPMGVVRPLTEVEMDHYREPFLNPVDREPLWRFPNELPIAGEPANIVALVEEYMDWLHQSPVPKLLFWGTPGVLIPPAEAARLAKSLPNCKAVDIGPGLNLLQEDNPDLIGSEIARWLSTLEISG

SEQ ID NO: 1585 - protein, 277 aa, Synthetic construct
MFHYVDVGPRDGTPVLFLHGNPTSSYVWRNIIPHVAPTHRCIAPDLIGMGKSDKPDLGYFFDDHVRFIDAFIEALGLEEVVLVIHDWGSALGFHWAKRNPERVKGIAFMEFIRPIPTWDEWPEFARETFQAFRTTDVGRKLIIDQNVFIEGTLPMGVVRPLTEVEMDHYREPFLNPVDREPLWRFPNELPIAGEPANIVALVEEYMDWLHQSPVPKLLFWGTPGVLIPPAEAARLAKSLPNCKAVDIGPGLNLLQEDNPDLIGSEIARWLSTLEISG

SEQ ID NO: 1586 - protein, 277 aa, Synthetic construct
MFHYVDVGPRDGTPVLFLHGNPTSSYVWRNIIPHVAPTHRCIAPDLIGMGKSDKPDLGYFFDDHVRFVDAFIEALGLEEVVLVIHDWGSALGFHWAKRNPERVKGIAFMEFIRPIPTWDEWPEFARETFQAFRTTDVGRKLIIDQNVFIEGTLPMGVVRPLTEVEMDHYREPFLNPVDREPLWRFPNELPIAGEPANIVALVEEYMDWLHQSPVPKLLFWGTPGVLIPPAEAARLAKSLPNCKAVDIGPGLNLLQEDNPDLIGSEIARWLSTLEISG

SEQ ID NO: 1587 - protein, 277 aa, Synthetic construct
MFHYVDVGPRDGTPVLFLHGNPTSSYVWRNIIPHVAPTHRCIAPDLIGMGKSDKPDLGYFFDDHVRFFDAFIEALGLEEVVLVIHDWGSALGFHWAKRNPERVKGIAFMEFIRPIPTWDEWPEFARETFQAFRTTDVGRKLIIDQNVFIEGTLPMGVVRPLTEVEMDHYREPFLNPVDREPLWRFPNELPIAGEPANIVALVEEYMDWLHQSPVPKLLFWGTPGVLIPPAEAARLAKSLPNCKAVDIGPGLNLLQEDNPDLIGSEIARWLSTLEISG

SEQ ID NO: 1588 - protein, 277 aa, Synthetic construct
MFHYVDVGPRDGTPVLFLHGNPTSSYVWRNIIPHVAPTHRCIAPDLIGMGKSDKPDLGYFFDDHVRFTDAFIEALGLEEVVLVIHDWGSALGFHWAKRNPERVKGIAFMEFIRPIPTWDEWPEFARETFQAFRTTDVGRKLIIDQNVFIEGTLPMGVVRPLTEVEMDHYREPFLNPVDREPLWRFPNELPIAGEPANIVALVEEYMDWLHQSPVPKLLFWGTPGVLIPPAEAARLAKSLPNCKAVDIGPGLNLLQEDNPDLIGSEIARWLSTLEISG

SEQ ID NO: 1589 - protein, 277 aa, Synthetic construct
MFHYVDVGPRDGTPVLFLHGNPTSSYVWRNIIPHVAPTHRCIAPDLIGMGKSDKPDLGYFFDDHVRFADAFIEALGLEEVVLVIHDWGSALGFHWAKRNPERVKGIAFMEFIRPIPTWDEWPEFARETFQAFRTTDVGRKLIIDQNVFIEGTLPMGVVRPLTEVEMDHYREPFLNPVDREPLWRFPNELPIAGEPANIVALVEEYMDWLHQSPVPKLLFWGTPGVLIPPAEAARLAKSLPNCKAVDIGPGLNLLQEDNPDLIGSEIARWLSTLEISG

SEQ ID NO: 1590 - protein, 277 aa, Synthetic construct
MFHYVDVGPRDGTPVLFLHGNPTSSYVWRNIIPHVAPTHRCIAPDLIGMGKSDKPDLGYFFDDHVRFMEAFIEALGLEEVVLVIHDWGSALGFHWAKRNPERVKGIAFMEFIRPIPTWDEWPEFARETFQAFRTTDVGRKLIIDQNVFIEGTLPMGVVRPLTEVEMDHYREPFLNPVDREPLWRFPNELPIAGEPANIVALVEEYMDWLHQSPVPKLLFWGTPGVLIPPAEAARLAKSLPNCKAVDIGPGLNLLQEDNPDLIGSEIARWLSTLEISG

SEQ ID NO: 1591 - protein, 277 aa, Synthetic construct
MFHYVDVGPRDGTPVLFLHGNPTSSYVWRNIIPHVAPTHRCIAPDLIGMGKSDKPDLGYFFDDHVRFMNAFIEALGLEEVVLVIHDWGSALGFHWAKRNPERVKGIAFMEFIRPIPTWDEWPEFARETFQAFRTTDVGRKLIIDQNVFIEGTLPMGVVRPLTEVEMDHYREPFLNPVDREPLWRFPNELPIAGEPANIVALVEEYMDWLHQSPVPKLLFWGTPGVLIPPAEAARLAKSLPNCKAVDIGPGLNLLQEDNPDLIGSEIARWLSTLEISG

SEQ ID NO: 1592 - protein, 277 aa, Synthetic construct
MFHYVDVGPRDGTPVLFLHGNPTSSYVWRNIIPHVAPTHRCIAPDLIGMGKSDKPDLGYFFDDHVRFMGAFIEALGLEEVVLVIHDWGSALGFHWAKRNPERVKGIAFMEFIRPIPTWDEWPEFARETFQAFRTTDVGRKLIIDQNVFIEGTLPMGVVRPLTEVEMDHYREPFLNPVDREPLWRFPNELPIAGEPANIVALVEEYMDWLHQSPVPKLLFWGTPGVLIPPAEAARLAKSLPNCKAVDIGPGLNLLQEDNPDLIGSEIARWLSTLEISG

SEQ ID NO: 1593 - protein, 277 aa, Synthetic construct
MFHYVDVGPRDGTPVLFLHGNPTSSYVWRNIIPHVAPTHRCIAPDLIGMGKSDKPDLGYFFDDHVRFMTAFIEALGLEEVVLVIHDWGSALGFHWAKRNPERVKGIAFMEFIRPIPTWDEWPEFARETFQAFRTTDVGRKLIIDQNVFIEGTLPMGVVRPLTEVEMDHYREPFLNPVDREPLWRFPNELPIAGEPANIVALVEEYMDWLHQSPVPKLLFWGTPGVLIPPAEAARLAKSLPNCKAVDIGPGLNLLQEDNPDLIGSEIARWLSTLEISG

SEQ ID NO: 1594 - protein, 277 aa, Synthetic construct
MFHYVDVGPRDGTPVLFLHGNPTSSYVWRNIIPHVAPTHRCIAPDLIGMGKSDKPDLGYFFDDHVRFMSAFIEALGLEEVVLVIHDWGSALGFHWAKRNPERVKGIAFMEFIRPIPTWDEWPEFARETFQAFRTTDVGRKLIIDQNVFIEGTLPMGVVRPLTEVEMDHYREPFLNPVDREPLWRFPNELPIAGEPANIVALVEEYMDWLHQSPVPKLLFWGTPGVLIPPAEAARLAKSLPNCKAVDIGPGLNLLQEDNPDLIGSEIARWLSTLEISG

SEQ ID NO: 1595 - protein, 277 aa, Synthetic construct
MFHYVDVGPRDGTPVLFLHGNPTSSYVWRNIIPHVAPTHRCIAPDLIGMGKSDKPDLGYFFDDHVRFMAAFIEALGLEEVVLVIHDWGSALGFHWAKRNPERVKGIAFMEFIRPIPTWDEWPEFARETFQAFRTTDVGRKLIIDQNVFIEGTLPMGVVRPLTEVEMDHYREPFLNPVDREPLWRFPNELPIAGEPANIVALVEEYMDWLHQSPVPKLLFWGTPGVLIPPAEAARLAKSLPNCKAVDIGPGLNLLQEDNPDLIGSEIARWLSTLEISG

SEQ ID NO: 1596 - protein, 277 aa, Synthetic construct
MFHYVDVGPRDGTPVLFLHGNPTSSYVWRNIIPHVAPTHRCIAPDLIGMGKSDKPDLGYFFDDHVRFMDGFIEALGLEEVVLVIHDWGSALGFHWAKRNPERVKGIAFMEFIRPIPTWDEWPEFARETFQAFRTTDVGRKLIIDQNVFIEGTLPMGVVRPLTEVEMDHYREPFLNPVDREPLWRFPNELPIAGEPANIVALVEEYMDWLHQSPVPKLLFWGTPGVLIPPAEAARLAKSLPNCKAVDIGPGLNLLQEDNPDLIGSEIARWLSTLEISG

SEQ ID NO: 1597 - protein, 277 aa, Synthetic construct
MFHYVDVGPRDGTPVLFLHGNPTSSYVWRNIIPHVAPTHRCIAPDLIGMGKSDKPDLGYFFDDHVRFMDEFIEALGLEEVVLVIHDWGSALGFHWAKRNPERVKGIAFMEFIRPIPTWDEWPEFARETFQAFRTTDVGRKLIIDQNVFIEGTLPMGVVRPLTEVEMDHYREPFLNPVDREPLWRFPNELPIAGEPANIVALVEEYMDWLHQSPVPKLLFWGTPGVLIPPAEAARLAKSLPNCKAVDIGPGLNLLQEDNPDLIGSEIARWLSTLEISG

SEQ ID NO: 1598 - protein, 277 aa, Synthetic construct
MFHYVDVGPRDGTPVLFLHGNPTSSYVWRNIIPHVAPTHRCIAPDLIGMGKSDKPDLGYFFDDHVRFMDSFIEALGLEEVVLVIHDWGSALGFHWAKRNPERVKGIAFMEFIRPIPTWDEWPEFARETFQAFRTTDVGRKLIIDQNVFIEGTLPMGVVRPLTEVEMDHYREPFLNPVDREPLWRFPNELPIAGEPANIVALVEEYMDWLHQSPVPKLLFWGTPGVLIPPAEAARLAKSLPNCKAVDIGPGLNLLQEDNPDLIGSEIARWLSTLEISG

SEQ ID NO: 1599 - protein, 277 aa, Synthetic construct
MFHYVDVGPRDGTPVLFLHGNPTSSYVWRNIIPHVAPTHRCIAPDLIGMGKSDKPDLGYFFDDHVRFMDRFIEALGLEEVVLVIHDWGSALGFHWAKRNPERVKGIAFMEFIRPIPTWDEWPEFARETFQAFRTTDVGRKLIIDQNVFIEGTLPMGVVRPLTEVEMDHYREPFLNPVDREPLWRFPNELPIAGEPANIVALVEEYMDWLHQSPVPKLLFWGTPGVLIPPAEAARLAKSLPNCKAVDIGPGLNLLQEDNPDLIGSEIARWLSTLEISG

SEQ ID NO: 1600 - protein, 277 aa, Synthetic construct
MFHYVDVGPRDGTPVLFLHGNPTSSYVWRNIIPHVAPTHRCIAPDLIGMGKSDKPDLGYFFDDHVRFMDDFIEALGLEEVVLVIHDWGSALGFHWAKRNPERVKGIAFMEFIRPIPTWDEWPEFARETFQAFRTTDVGRKLIIDQNVFIEGTLPMGVVRPLTEVEMDHYREPFLNPVDREPLWRFPNELPIAGEPANIVALVEEYMDWLHQSPVPKLLFWGTPGVLIPPAEAARLAKSLPNCKAVDIGPGLNLLQEDNPDLIGSEIARWLSTLEISG

SEQ ID NO: 1601 - protein, 277 aa, Synthetic construct
MFHYVDVGPRDGTPVLFLHGNPTSSYVWRNIIPHVAPTHRCIAPDLIGMGKSDKPDLGYFFDDHVRFMDQFIEALGLEEVVLVIHDWGSALGFHWAKRNPERVKGIAFMEFIRPIPTWDEWPEFARETFQAFRTTDVGRKLIIDQNVFIEGTLPMGVVRPLTEVEMDHYREPFLNPVDREPLWRFPNELPIAGEPANIVALVEEYMDWLHQSPVPKLLFWGTPGVLIPPAEAARLAKSLPNCKAVDIGPGLNLLQEDNPDLIGSEIARWLSTLEISG

SEQ ID NO: 1602 - protein, 277 aa, Synthetic construct
MFHYVDVGPRDGTPVLFLHGNPTSSYVWRNIIPHVAPTHRCIAPDLIGMGKSDKPDLGYFFDDHVRFMDAWIEALGLEEVVLVIHDWGSALGFHWAKRNPERVKGIAFMEFIRPIPTWDEWPEFARETFQAFRTTDVGRKLIIDQNVFIEGTLPMGVVRPLTEVEMDHYREPFLNPVDREPLWRFPNELPIAGEPANIVALVEEYMDWLHQSPVPKLLFWGTPGVLIPPAEAARLAKSLPNCKAVDIGPGLNLLQEDNPDLIGSEIARWLSTLEISG

SEQ ID NO: 1603 - protein, 277 aa, Synthetic construct
MFHYVDVGPRDGTPVLFLHGNPTSSYVWRNIIPHVAPTHRCIAPDLIGMGKSDKPDLGYFFDDHVRFMDALIEALGLEEVVLVIHDWGSALGFHWAKRNPERVKGIAFMEFIRPIPTWDEWPEFARETFQAFRTTDVGRKLIIDQNVFIEGTLPMGVVRPLTEVEMDHYREPFLNPVDREPLWRFPNELPIAGEPANIVALVEEYMDWLHQSPVPKLLFWGTPGVLIPPAEAARLAKSLPNCKAVDIGPGLNLLQEDNPDLIGSEIARWLSTLEISG

SEQ ID NO: 1604 - protein, 277 aa, Synthetic construct
MFHYVDVGPRDGTPVLFLHGNPTSSYVWRNIIPHVAPTHRCIAPDLIGMGKSDKPDLGYFFDDHVRFMDAVIEALGLEEVVLVIHDWGSALGFHWAKRNPERVKGIAFMEFIRPIPTWDEWPEFARETFQAFRTTDVGRKLIIDQNVFIEGTLPMGVVRPLTEVEMDHYREPFLNPVDREPLWRFPNELPIAGEPANIVALVEEYMDWLHQSPVPKLLFWGTPGVLIPPAEAARLAKSLPNCKAVDIGPGLNLLQEDNPDLIGSEIARWLSTLEISG

SEQ ID NO: 1605 - protein, 277 aa, Synthetic construct
MFHYVDVGPRDGTPVLFLHGNPTSSYVWRNIIPHVAPTHRCIAPDLIGMGKSDKPDLGYFFDDHVRFMDAMIEALGLEEVVLVIHDWGSALGFHWAKRNPERVKGIAFMEFIRPIPTWDEWPEFARETFQAFRTTDVGRKLIIDQNVFIEGTLPMGVVRPLTEVEMDHYREPFLNPVDREPLWRFPNELPIAGEPANIVALVEEYMDWLHQSPVPKLLFWGTPGVLIPPAEAARLAKSLPNCKAVDIGPGLNLLQEDNPDLIGSEIARWLSTLEISG

SEQ ID NO: 1606 - protein, 277 aa, Synthetic construct
MFHYVDVGPRDGTPVLFLHGNPTSSYVWRNIIPHVAPTHRCIAPDLIGMGKSDKPDLGYFFDDHVRFMDAAIEALGLEEVVLVIHDWGSALGFHWAKRNPERVKGIAFMEFIRPIPTWDEWPEFARETFQAFRTTDVGRKLIIDQNVFIEGTLPMGVVRPLTEVEMDHYREPFLNPVDREPLWRFPNELPIAGEPANIVALVEEYMDWLHQSPVPKLLFWGTPGVLIPPAEAARLAKSLPNCKAVDIGPGLNLLQEDNPDLIGSEIARWLSTLEISG

SEQ ID NO: 1607 - protein, 277 aa, Synthetic construct
MFHYVDVGPRDGTPVLFLHGNPTSSYVWRNIIPHVAPTHRCIAPDLIGMGKSDKPDLGYFFDDHVRFMDAYIEALGLEEVVLVIHDWGSALGFHWAKRNPERVKGIAFMEFIRPIPTWDEWPEFARETFQAFRTTDVGRKLIIDQNVFIEGTLPMGVVRPLTEVEMDHYREPFLNPVDREPLWRFPNELPIAGEPANIVALVEEYMDWLHQSPVPKLLFWGTPGVLIPPAEAARLAKSLPNCKAVDIGPGLNLLQEDNPDLIGSEIARWLSTLEISG

SEQ ID NO: 1608 - protein, 277 aa, Synthetic construct
MFHYVDVGPRDGTPVLFLHGNPTSSYVWRNIIPHVAPTHRCIAPDLIGMGKSDKPDLGYFFDDHVRFMDAFVEALGLEEVVLVIHDWGSALGFHWAKRNPERVKGIAFMEFIRPIPTWDEWPEFARETFQAFRTTDVGRKLIIDQNVFIEGTLPMGVVRPLTEVEMDHYREPFLNPVDREPLWRFPNELPIAGEPANIVALVEEYMDWLHQSPVPKLLFWGTPGVLIPPAEAARLAKSLPNCKAVDIGPGLNLLQEDNPDLIGSEIARWLSTLEISG

SEQ ID NO: 1609 - protein, 277 aa, Synthetic construct
MFHYVDVGPRDGTPVLFLHGNPTSSYVWRNIIPHVAPTHRCIAPDLIGMGKSDKPDLGYFFDDHVRFMDAFFEALGLEEVVLVIHDWGSALGFHWAKRNPERVKGIAFMEFIRPIPTWDEWPEFARETFQAFRTTDVGRKLIIDQNVFIEGTLPMGVVRPLTEVEMDHYREPFLNPVDREPLWRFPNELPIAGEPANIVALVEEYMDWLHQSPVPKLLFWGTPGVLIPPAEAARLAKSLPNCKAVDIGPGLNLLQEDNPDLIGSEIARWLSTLEISG

SEQ ID NO: 1610 - protein, 277 aa, Synthetic construct
MFHYVDVGPRDGTPVLFLHGNPTSSYVWRNIIPHVAPTHRCIAPDLIGMGKSDKPDLGYFFDDHVRFMDAFLEALGLEEVVLVIHDWGSALGFHWAKRNPERVKGIAFMEFIRPIPTWDEWPEFARETFQAFRTTDVGRKLIIDQNVFIEGTLPMGVVRPLTEVEMDHYREPFLNPVDREPLWRFPNELPIAGEPANIVALVEEYMDWLHQSPVPKLLFWGTPGVLIPPAEAARLAKSLPNCKAVDIGPGLNLLQEDNPDLIGSEIARWLSTLEISG

SEQ ID NO: 1611 - protein, 277 aa, Synthetic construct
MFHYVDVGPRDGTPVLFLHGNPTSSYVWRNIIPHVAPTHRCIAPDLIGMGKSDKPDLGYFFDDHVRFMDAFTEALGLEEVVLVIHDWGSALGFHWAKRNPERVKGIAFMEFIRPIPTWDEWPEFARETFQAFRTTDVGRKLIIDQNVFIEGTLPMGVVRPLTEVEMDHYREPFLNPVDREPLWRFPNELPIAGEPANIVALVEEYMDWLHQSPVPKLLFWGTPGVLIPPAEAARLAKSLPNCKAVDIGPGLNLLQEDNPDLIGSEIARWLSTLEISG

SEQ ID NO: 1612 - protein, 277 aa, Synthetic construct
MFHYVDVGPRDGTPVLFLHGNPTSSYVWRNIIPHVAPTHRCIAPDLIGMGKSDKPDLGYFFDDHVRFMDAFAEALGLEEVVLVIHDWGSALGFHWAKRNPERVKGIAFMEFIRPIPTWDEWPEFARETFQAFRTTDVGRKLIIDQNVFIEGTLPMGVVRPLTEVEMDHYREPFLNPVDREPLWRFPNELPIAGEPANIVALVEEYMDWLHQSPVPKLLFWGTPGVLIPPAEAARLAKSLPNCKAVDIGPGLNLLQEDNPDLIGSEIARWLSTLEISG

SEQ ID NO: 1613 - protein, 277 aa, Synthetic construct
MFHYVDVGPRDGTPVLFLHGNPTSSYVWRNIIPHVAPTHRCIAPDLIGMGKSDKPDLGYFFDDHVRFMDAFMEALGLEEVVLVIHDWGSALGFHWAKRNPERVKGIAFMEFIRPIPTWDEWPEFARETFQAFRTTDVGRKLIIDQNVFIEGTLPMGVVRPLTEVEMDHYREPFLNPVDREPLWRFPNELPIAGEPANIVALVEEYMDWLHQSPVPKLLFWGTPGVLIPPAEAARLAKSLPNCKAVDIGPGLNLLQEDNPDLIGSEIARWLSTLEISG

SEQ ID NO: 1614 - protein, 277 aa, Synthetic construct
MFHYVDVGPRDGTPVLFLHGNPTSSYVWRNIIPHVAPTHRCIAPDLIGMGKSDKPDLGYFFDDHVRFMDAFIDALGLEEVVLVIHDWGSALGFHWAKRNPERVKGIAFMEFIRPIPTWDEWPEFARETFQAFRTTDVGRKLIIDQNVFIEGTLPMGVVRPLTEVEMDHYREPFLNPVDREPLWRFPNELPIAGEPANIVALVEEYMDWLHQSPVPKLLFWGTPGVLIPPAEAARLAKSLPNCKAVDIGPGLNLLQEDNPDLIGSEIARWLSTLEISG

SEQ ID NO: 1615 - protein, 277 aa, Synthetic construct
MFHYVDVGPRDGTPVLFLHGNPTSSYVWRNIIPHVAPTHRCIAPDLIGMGKSDKPDLGYFFDDHVRFMDAFIAALGLEEVVLVIHDWGSALGFHWAKRNPERVKGIAFMEFIRPIPTWDEWPEFARETFQAFRTTDVGRKLIIDQNVFIEGTLPMGVVRPLTEVEMDHYREPFLNPVDREPLWRFPNELPIAGEPANIVALVEEYMDWLHQSPVPKLLFWGTPGVLIPPAEAARLAKSLPNCKAVDIGPGLNLLQEDNPDLIGSEIARWLSTLEISG

SEQ ID NO: 1616 - protein, 277 aa, Synthetic construct
MFHYVDVGPRDGTPVLFLHGNPTSSYVWRNIIPHVAPTHRCIAPDLIGMGKSDKPDLGYFFDDHVRFMDAFITALGLEEVVLVIHDWGSALGFHWAKRNPERVKGIAFMEFIRPIPTWDEWPEFARETFQAFRTTDVGRKLIIDQNVFIEGTLPMGVVRPLTEVEMDHYREPFLNPVDREPLWRFPNELPIAGEPANIVALVEEYMDWLHQSPVPKLLFWGTPGVLIPPAEAARLAKSLPNCKAVDIGPGLNLLQEDNPDLIGSEIARWLSTLEISG

SEQ ID NO: 1617 - protein, 277 aa, Synthetic construct
MFHYVDVGPRDGTPVLFLHGNPTSSYVWRNIIPHVAPTHRCIAPDLIGMGKSDKPDLGYFFDDHVRFMDAFISALGLEEVVLVIHDWGSALGFHWAKRNPERVKGIAFMEFIRPIPTWDEWPEFARETFQAFRTTDVGRKLIIDQNVFIEGTLPMGVVRPLTEVEMDHYREPFLNPVDREPLWRFPNELPIAGEPANIVALVEEYMDWLHQSPVPKLLFWGTPGVLIPPAEAARLAKSLPNCKAVDIGPGLNLLQEDNPDLIGSEIARWLSTLEISG

SEQ ID NO: 1618 - protein, 277 aa, Synthetic construct
MFHYVDVGPRDGTPVLFLHGNPTSSYVWRNIIPHVAPTHRCIAPDLIGMGKSDKPDLGYFFDDHVRFMDAFIQALGLEEVVLVIHDWGSALGFHWAKRNPERVKGIAFMEFIRPIPTWDEWPEFARETFQAFRTTDVGRKLIIDQNVFIEGTLPMGVVRPLTEVEMDHYREPFLNPVDREPLWRFPNELPIAGEPANIVALVEEYMDWLHQSPVPKLLFWGTPGVLIPPAEAARLAKSLPNCKAVDIGPGLNLLQEDNPDLIGSEIARWLSTLEISG

SEQ ID NO: 1619 - protein, 277 aa, Synthetic construct
MFHYVDVGPRDGTPVLFLHGNPTSSYVWRNIIPHVAPTHRCIAPDLIGMGKSDKPDLGYFFDDHVRFMDAFIGALGLEEVVLVIHDWGSALGFHWAKRNPERVKGIAFMEFIRPIPTWDEWPEFARETFQAFRTTDVGRKLIIDQNVFIEGTLPMGVVRPLTEVEMDHYREPFLNPVDREPLWRFPNELPIAGEPANIVALVEEYMDWLHQSPVPKLLFWGTPGVLIPPAEAARLAKSLPNCKAVDIGPGLNLLQEDNPDLIGSEIARWLSTLEISG

SEQ ID NO: 1620 - protein, 277 aa, Synthetic construct
MFHYVDVGPRDGTPVLFLHGNPTSSYVWRNIIPHVAPTHRCIAPDLIGMGKSDKPDLGYFFDDHVRFMDAFIEELGLEEVVLVIHDWGSALGFHWAKRNPERVKGIAFMEFIRPIPTWDEWPEFARETFQAFRTTDVGRKLIIDQNVFIEGTLPMGVVRPLTEVEMDHYREPFLNPVDREPLWRFPNELPIAGEPANIVALVEEYMDWLHQSPVPKLLFWGTPGVLIPPAEAARLAKSLPNCKAVDIGPGLNLLQEDNPDLIGSEIARWLSTLEISG

SEQ ID NO: 1621 - protein, 277 aa, Synthetic construct
MFHYVDVGPRDGTPVLFLHGNPTSSYVWRNIIPHVAPTHRCIAPDLIGMGKSDKPDLGYFFDDHVRFMDAFIEKLGLEEVVLVIHDWGSALGFHWAKRNPERVKGIAFMEFIRPIPTWDEWPEFARETFQAFRTTDVGRKLIIDQNVFIEGTLPMGVVRPLTEVEMDHYREPFLNPVDREPLWRFPNELPIAGEPANIVALVEEYMDWLHQSPVPKLLFWGTPGVLIPPAEAARLAKSLPNCKAVDIGPGLNLLQEDNPDLIGSEIARWLSTLEISG

SEQ ID NO: 1622 - protein, 277 aa, Synthetic construct
MFHYVDVGPRDGTPVLFLHGNPTSSYVWRNIIPHVAPTHRCIAPDLIGMGKSDKPDLGYFFDDHVRFMDAFIEQLGLEEVVLVIHDWGSALGFHWAKRNPERVKGIAFMEFIRPIPTWDEWPEFARETFQAFRTTDVGRKLIIDQNVFIEGTLPMGVVRPLTEVEMDHYREPFLNPVDREPLWRFPNELPIAGEPANIVALVEEYMDWLHQSPVPKLLFWGTPGVLIPPAEAARLAKSLPNCKAVDIGPGLNLLQEDNPDLIGSEIARWLSTLEISG

SEQ ID NO: 1623 - protein, 277 aa, Synthetic construct
MFHYVDVGPRDGTPVLFLHGNPTSSYVWRNIIPHVAPTHRCIAPDLIGMGKSDKPDLGYFFDDHVRFMDAFIERLGLEEVVLVIHDWGSALGFHWAKRNPERVKGIAFMEFIRPIPTWDEWPEFARETFQAFRTTDVGRKLIIDQNVFIEGTLPMGVVRPLTEVEMDHYREPFLNPVDREPLWRFPNELPIAGEPANIVALVEEYMDWLHQSPVPKLLFWGTPGVLIPPAEAARLAKSLPNCKAVDIGPGLNLLQEDNPDLIGSEIARWLSTLEISG

SEQ ID NO: 1624 - protein, 277 aa, Synthetic construct
MFHYVDVGPRDGTPVLFLHGNPTSSYVWRNIIPHVAPTHRCIAPDLIGMGKSDKPDLGYFFDDHVRFMDAFIETLGLEEVVLVIHDWGSALGFHWAKRNPERVKGIAFMEFIRPIPTWDEWPEFARETFQAFRTTDVGRKLIIDQNVFIEGTLPMGVVRPLTEVEMDHYREPFLNPVDREPLWRFPNELPIAGEPANIVALVEEYMDWLHQSPVPKLLFWGTPGVLIPPAEAARLAKSLPNCKAVDIGPGLNLLQEDNPDLIGSEIARWLSTLEISG

SEQ ID NO: 1625 - protein, 277 aa, Synthetic construct
MFHYVDVGPRDGTPVLFLHGNPTSSYVWRNIIPHVAPTHRCIAPDLIGMGKSDKPDLGYFFDDHVRFMDAFIEHLGLEEVVLVIHDWGSALGFHWAKRNPERVKGIAFMEFIRPIPTWDEWPEFARETFQAFRTTDVGRKLIIDQNVFIEGTLPMGVVRPLTEVEMDHYREPFLNPVDREPLWRFPNELPIAGEPANIVALVEEYMDWLHQSPVPKLLFWGTPGVLIPPAEAARLAKSLPNCKAVDIGPGLNLLQEDNPDLIGSEIARWLSTLEISG

SEQ ID NO: 1626 - protein, 277 aa, Synthetic construct
MFHYVDVGPRDGTPVLFLHGNPTSSYVWRNIIPHVAPTHRCIAPDLIGMGKSDKPDLGYFFDDHVRFMDAFIEAIGLEEVVLVIHDWGSALGFHWAKRNPERVKGIAFMEFIRPIPTWDEWPEFARETFQAFRTTDVGRKLIIDQNVFIEGTLPMGVVRPLTEVEMDHYREPFLNPVDREPLWRFPNELPIAGEPANIVALVEEYMDWLHQSPVPKLLFWGTPGVLIPPAEAARLAKSLPNCKAVDIGPGLNLLQEDNPDLIGSEIARWLSTLEISG

SEQ ID NO: 1627 - protein, 277 aa, Synthetic construct
MFHYVDVGPRDGTPVLFLHGNPTSSYVWRNIIPHVAPTHRCIAPDLIGMGKSDKPDLGYFFDDHVRFMDAFIEAMGLEEVVLVIHDWGSALGFHWAKRNPERVKGIAFMEFIRPIPTWDEWPEFARETFQAFRTTDVGRKLIIDQNVFIEGTLPMGVVRPLTEVEMDHYREPFLNPVDREPLWRFPNELPIAGEPANIVALVEEYMDWLHQSPVPKLLFWGTPGVLIPPAEAARLAKSLPNCKAVDIGPGLNLLQEDNPDLIGSEIARWLSTLEISG

SEQ ID NO: 1628 - protein, 277 aa, Synthetic construct
MFHYVDVGPRDGTPVLFLHGNPTSSYVWRNIIPHVAPTHRCIAPDLIGMGKSDKPDLGYFFDDHVRFMDAFIEAVGLEEVVLVIHDWGSALGFHWAKRNPERVKGIAFMEFIRPIPTWDEWPEFARETFQAFRTTDVGRKLIIDQNVFIEGTLPMGVVRPLTEVEMDHYREPFLNPVDREPLWRFPNELPIAGEPANIVALVEEYMDWLHQSPVPKLLFWGTPGVLIPPAEAARLAKSLPNCKAVDIGPGLNLLQEDNPDLIGSEIARWLSTLEISG

SEQ ID NO: 1629 - protein, 277 aa, Synthetic construct
MFHYVDVGPRDGTPVLFLHGNPTSSYVWRNIIPHVAPTHRCIAPDLIGMGKSDKPDLGYFFDDHVRFMDAFIEAAGLEEVVLVIHDWGSALGFHWAKRNPERVKGIAFMEFIRPIPTWDEWPEFARETFQAFRTTDVGRKLIIDQNVFIEGTLPMGVVRPLTEVEMDHYREPFLNPVDREPLWRFPNELPIAGEPANIVALVEEYMDWLHQSPVPKLLFWGTPGVLIPPAEAARLAKSLPNCKAVDIGPGLNLLQEDNPDLIGSEIARWLSTLEISG

SEQ ID NO: 1630 - protein, 277 aa, Synthetic construct
MFHYVDVGPRDGTPVLFLHGNPTSSYVWRNIIPHVAPTHRCIAPDLIGMGKSDKPDLGYFFDDHVRFMDAFIEAQGLEEVVLVIHDWGSALGFHWAKRNPERVKGIAFMEFIRPIPTWDEWPEFARETFQAFRTTDVGRKLIIDQNVFIEGTLPMGVVRPLTEVEMDHYREPFLNPVDREPLWRFPNELPIAGEPANIVALVEEYMDWLHQSPVPKLLFWGTPGVLIPPAEAARLAKSLPNCKAVDIGPGLNLLQEDNPDLIGSEIARWLSTLEISG

SEQ ID NO: 1631 - protein, 277 aa, Synthetic construct
MFHYVDVGPRDGTPVLFLHGNPTSSYVWRNIIPHVAPTHRCIAPDLIGMGKSDKPDLGYFFDDHVRFMDAFIEATGLEEVVLVIHDWGSALGFHWAKRNPERVKGIAFMEFIRPIPTWDEWPEFARETFQAFRTTDVGRKLIIDQNVFIEGTLPMGVVRPLTEVEMDHYREPFLNPVDREPLWRFPNELPIAGEPANIVALVEEYMDWLHQSPVPKLLFWGTPGVLIPPAEAARLAKSLPNCKAVDIGPGLNLLQEDNPDLIGSEIARWLSTLEISG

SEQ ID NO: 1632 - protein, 277 aa, Synthetic construct
MFHYVDVGPRDGTPVLFLHGNPTSSYVWRNIIPHVAPTHRCIAPDLIGMGKSDKPDLGYFFDDHVRFMDAFIEALDLEEVVLVIHDWGSALGFHWAKRNPERVKGIAFMEFIRPIPTWDEWPEFARETFQAFRTTDVGRKLIIDQNVFIEGTLPMGVVRPLTEVEMDHYREPFLNPVDREPLWRFPNELPIAGEPANIVALVEEYMDWLHQSPVPKLLFWGTPGVLIPPAEAARLAKSLPNCKAVDIGPGLNLLQEDNPDLIGSEIARWLSTLEISG

SEQ ID NO: 1633 - protein, 277 aa, Synthetic construct
MFHYVDVGPRDGTPVLFLHGNPTSSYVWRNIIPHVAPTHRCIAPDLIGMGKSDKPDLGYFFDDHVRFMDAFIEALELEEVVLVIHDWGSALGFHWAKRNPERVKGIAFMEFIRPIPTWDEWPEFARETFQAFRTTDVGRKLIIDQNVFIEGTLPMGVVRPLTEVEMDHYREPFLNPVDREPLWRFPNELPIAGEPANIVALVEEYMDWLHQSPVPKLLFWGTPGVLIPPAEAARLAKSLPNCKAVDIGPGLNLLQEDNPDLIGSEIARWLSTLEISG

SEQ ID NO: 1634 - protein, 277 aa, Synthetic construct
MFHYVDVGPRDGTPVLFLHGNPTSSYVWRNIIPHVAPTHRCIAPDLIGMGKSDKPDLGYFFDDHVRFMDAFIEALNLEEVVLVIHDWGSALGFHWAKRNPERVKGIAFMEFIRPIPTWDEWPEFARETFQAFRTTDVGRKLIIDQNVFIEGTLPMGVVRPLTEVEMDHYREPFLNPVDREPLWRFPNELPIAGEPANIVALVEEYMDWLHQSPVPKLLFWGTPGVLIPPAEAARLAKSLPNCKAVDIGPGLNLLQEDNPDLIGSEIARWLSTLEISG

SEQ ID NO: 1635 - protein, 277 aa, Synthetic construct
MFHYVDVGPRDGTPVLFLHGNPTSSYVWRNIIPHVAPTHRCIAPDLIGMGKSDKPDLGYFFDDHVRFMDAFIEALKLEEVVLVIHDWGSALGFHWAKRNPERVKGIAFMEFIRPIPTWDEWPEFARETFQAFRTTDVGRKLIIDQNVFIEGTLPMGVVRPLTEVEMDHYREPFLNPVDREPLWRFPNELPIAGEPANIVALVEEYMDWLHQSPVPKLLFWGTPGVLIPPAEAARLAKSLPNCKAVDIGPGLNLLQEDNPDLIGSEIARWLSTLEISG

SEQ ID NO: 1636 - protein, 277 aa, Synthetic construct
MFHYVDVGPRDGTPVLFLHGNPTSSYVWRNIIPHVAPTHRCIAPDLIGMGKSDKPDLGYFFDDHVRFMDAFIEALALEEVVLVIHDWGSALGFHWAKRNPERVKGIAFMEFIRPIPTWDEWPEFARETFQAFRTTDVGRKLIIDQNVFIEGTLPMGVVRPLTEVEMDHYREPFLNPVDREPLWRFPNELPIAGEPANIVALVEEYMDWLHQSPVPKLLFWGTPGVLIPPAEAARLAKSLPNCKAVDIGPGLNLLQEDNPDLIGSEIARWLSTLEISG

SEQ ID NO: 1637 - protein, 277 aa, Synthetic construct
MFHYVDVGPRDGTPVLFLHGNPTSSYVWRNIIPHVAPTHRCIAPDLIGMGKSDKPDLGYFFDDHVRFMDAFIEALQLEEVVLVIHDWGSALGFHWAKRNPERVKGIAFMEFIRPIPTWDEWPEFARETFQAFRTTDVGRKLIIDQNVFIEGTLPMGVVRPLTEVEMDHYREPFLNPVDREPLWRFPNELPIAGEPANIVALVEEYMDWLHQSPVPKLLFWGTPGVLIPPAEAARLAKSLPNCKAVDIGPGLNLLQEDNPDLIGSEIARWLSTLEISG

SEQ ID NO: 1638 - protein, 277 aa, Synthetic construct
MFHYVDVGPRDGTPVLFLHGNPTSSYVWRNIIPHVAPTHRCIAPDLIGMGKSDKPDLGYFFDDHVRFMDAFIEALGIEEVVLVIHDWGSALGFHWAKRNPERVKGIAFMEFIRPIPTWDEWPEFARETFQAFRTTDVGRKLIIDQNVFIEGTLPMGVVRPLTEVEMDHYREPFLNPVDREPLWRFPNELPIAGEPANIVALVEEYMDWLHQSPVPKLLFWGTPGVLIPPAEAARLAKSLPNCKAVDIGPGLNLLQEDNPDLIGSEIARWLSTLEISG

SEQ ID NO: 1639 - protein, 277 aa, Synthetic construct
MFHYVDVGPRDGTPVLFLHGNPTSSYVWRNIIPHVAPTHRCIAPDLIGMGKSDKPDLGYFFDDHVRFMDAFIEALGVEEVVLVIHDWGSALGFHWAKRNPERVKGIAFMEFIRPIPTWDEWPEFARETFQAFRTTDVGRKLIIDQNVFIEGTLPMGVVRPLTEVEMDHYREPFLNPVDREPLWRFPNELPIAGEPANIVALVEEYMDWLHQSPVPKLLFWGTPGVLIPPAEAARLAKSLPNCKAVDIGPGLNLLQEDNPDLIGSEIARWLSTLEISG

SEQ ID NO: 1640 - protein, 277 aa, Synthetic construct
MFHYVDVGPRDGTPVLFLHGNPTSSYVWRNIIPHVAPTHRCIAPDLIGMGKSDKPDLGYFFDDHVRFMDAFIEALGFEEVVLVIHDWGSALGFHWAKRNPERVKGIAFMEFIRPIPTWDEWPEFARETFQAFRTTDVGRKLIIDQNVFIEGTLPMGVVRPLTEVEMDHYREPFLNPVDREPLWRFPNELPIAGEPANIVALVEEYMDWLHQSPVPKLLFWGTPGVLIPPAEAARLAKSLPNCKAVDIGPGLNLLQEDNPDLIGSEIARWLSTLEISG

SEQ ID NO: 1641 - protein, 277 aa, Synthetic construct
MFHYVDVGPRDGTPVLFLHGNPTSSYVWRNIIPHVAPTHRCIAPDLIGMGKSDKPDLGYFFDDHVRFMDAFIEALGMEEVVLVIHDWGSALGFHWAKRNPERVKGIAFMEFIRPIPTWDEWPEFARETFQAFRTTDVGRKLIIDQNVFIEGTLPMGVVRPLTEVEMDHYREPFLNPVDREPLWRFPNELPIAGEPANIVALVEEYMDWLHQSPVPKLLFWGTPGVLIPPAEAARLAKSLPNCKAVDIGPGLNLLQEDNPDLIGSEIARWLSTLEISG

SEQ ID NO: 1642 - protein, 277 aa, Synthetic construct
MFHYVDVGPRDGTPVLFLHGNPTSSYVWRNIIPHVAPTHRCIAPDLIGMGKSDKPDLGYFFDDHVRFMDAFIEALGAEEVVLVIHDWGSALGFHWAKRNPERVKGIAFMEFIRPIPTWDEWPEFARETFQAFRTTDVGRKLIIDQNVFIEGTLPMGVVRPLTEVEMDHYREPFLNPVDREPLWRFPNELPIAGEPANIVALVEEYMDWLHQSPVPKLLFWGTPGVLIPPAEAARLAKSLPNCKAVDIGPGLNLLQEDNPDLIGSEIARWLSTLEISG

SEQ ID NO: 1643 - protein, 277 aa, Synthetic construct
MFHYVDVGPRDGTPVLFLHGNPTSSYVWRNIIPHVAPTHRCIAPDLIGMGKSDKPDLGYFFDDHVRFMDAFIEALGCEEVVLVIHDWGSALGFHWAKRNPERVKGIAFMEFIRPIPTWDEWPEFARETFQAFRTTDVGRKLIIDQNVFIEGTLPMGVVRPLTEVEMDHYREPFLNPVDREPLWRFPNELPIAGEPANIVALVEEYMDWLHQSPVPKLLFWGTPGVLIPPAEAARLAKSLPNCKAVDIGPGLNLLQEDNPDLIGSEIARWLSTLEISG

SEQ ID NO: 1644 - protein, 277 aa, Synthetic construct
MFHYVDVGPRDGTPVLFLHGNPTSSYVWRNIIPHVAPTHRCIAPDLIGMGKSDKPDLGYFFDDHVRFMDAFIEALGLDEVVLVIHDWGSALGFHWAKRNPERVKGIAFMEFIRPIPTWDEWPEFARETFQAFRTTDVGRKLIIDQNVFIEGTLPMGVVRPLTEVEMDHYREPFLNPVDREPLWRFPNELPIAGEPANIVALVEEYMDWLHQSPVPKLLFWGTPGVLIPPAEAARLAKSLPNCKAVDIGPGLNLLQEDNPDLIGSEIARWLSTLEISG

SEQ ID NO: 1645 - protein, 277 aa, Synthetic construct
MFHYVDVGPRDGTPVLFLHGNPTSSYVWRNIIPHVAPTHRCIAPDLIGMGKSDKPDLGYFFDDHVRFMDAFIEALGLKEVVLVIHDWGSALGFHWAKRNPERVKGIAFMEFIRPIPTWDEWPEFARETFQAFRTTDVGRKLIIDQNVFIEGTLPMGVVRPLTEVEMDHYREPFLNPVDREPLWRFPNELPIAGEPANIVALVEEYMDWLHQSPVPKLLFWGTPGVLIPPAEAARLAKSLPNCKAVDIGPGLNLLQEDNPDLIGSEIARWLSTLEISG

SEQ ID NO: 1646 - protein, 277 aa, Synthetic construct
MFHYVDVGPRDGTPVLFLHGNPTSSYVWRNIIPHVAPTHRCIAPDLIGMGKSDKPDLGYFFDDHVRFMDAFIEALGLTEVVLVIHDWGSALGFHWAKRNPERVKGIAFMEFIRPIPTWDEWPEFARETFQAFRTTDVGRKLIIDQNVFIEGTLPMGVVRPLTEVEMDHYREPFLNPVDREPLWRFPNELPIAGEPANIVALVEEYMDWLHQSPVPKLLFWGTPGVLIPPAEAARLAKSLPNCKAVDIGPGLNLLQEDNPDLIGSEIARWLSTLEISG

SEQ ID NO: 1647 - protein, 277 aa, Synthetic construct
MFHYVDVGPRDGTPVLFLHGNPTSSYVWRNIIPHVAPTHRCIAPDLIGMGKSDKPDLGYFFDDHVRFMDAFIEALGLSEVVLVIHDWGSALGFHWAKRNPERVKGIAFMEFIRPIPTWDEWPEFARETFQAFRTTDVGRKLIIDQNVFIEGTLPMGVVRPLTEVEMDHYREPFLNPVDREPLWRFPNELPIAGEPANIVALVEEYMDWLHQSPVPKLLFWGTPGVLIPPAEAARLAKSLPNCKAVDIGPGLNLLQEDNPDLIGSEIARWLSTLEISG

SEQ ID NO: 1648 - protein, 277 aa, Synthetic construct
MFHYVDVGPRDGTPVLFLHGNPTSSYVWRNIIPHVAPTHRCIAPDLIGMGKSDKPDLGYFFDDHVRFMDAFIEALGLREVVLVIHDWGSALGFHWAKRNPERVKGIAFMEFIRPIPTWDEWPEFARETFQAFRTTDVGRKLIIDQNVFIEGTLPMGVVRPLTEVEMDHYREPFLNPVDREPLWRFPNELPIAGEPANIVALVEEYMDWLHQSPVPKLLFWGTPGVLIPPAEAARLAKSLPNCKAVDIGPGLNLLQEDNPDLIGSEIARWLSTLEISG

SEQ ID NO: 1649 - protein, 277 aa, Synthetic construct
MFHYVDVGPRDGTPVLFLHGNPTSSYVWRNIIPHVAPTHRCIAPDLIGMGKSDKPDLGYFFDDHVRFMDAFIEALGLNEVVLVIHDWGSALGFHWAKRNPERVKGIAFMEFIRPIPTWDEWPEFARETFQAFRTTDVGRKLIIDQNVFIEGTLPMGVVRPLTEVEMDHYREPFLNPVDREPLWRFPNELPIAGEPANIVALVEEYMDWLHQSPVPKLLFWGTPGVLIPPAEAARLAKSLPNCKAVDIGPGLNLLQEDNPDLIGSEIARWLSTLEISG

SEQ ID NO: 1650 - protein, 277 aa, Synthetic construct
MFHYVDVGPRDGTPVLFLHGNPTSSYVWRNIIPHVAPTHRCIAPDLIGMGKSDKPDLGYFFDDHVRFMDAFIEALGLENVVLVIHDWGSALGFHWAKRNPERVKGIAFMEFIRPIPTWDEWPEFARETFQAFRTTDVGRKLIIDQNVFIEGTLPMGVVRPLTEVEMDHYREPFLNPVDREPLWRFPNELPIAGEPANIVALVEEYMDWLHQSPVPKLLFWGTPGVLIPPAEAARLAKSLPNCKAVDIGPGLNLLQEDNPDLIGSEIARWLSTLEISG

SEQ ID NO: 1651 - protein, 277 aa, Synthetic construct
MFHYVDVGPRDGTPVLFLHGNPTSSYVWRNIIPHVAPTHRCIAPDLIGMGKSDKPDLGYFFDDHVRFMDAFIEALGLERVVLVIHDWGSALGFHWAKRNPERVKGIAFMEFIRPIPTWDEWPEFARETFQAFRTTDVGRKLIIDQNVFIEGTLPMGVVRPLTEVEMDHYREPFLNPVDREPLWRFPNELPIAGEPANIVALVEEYMDWLHQSPVPKLLFWGTPGVLIPPAEAARLAKSLPNCKAVDIGPGLNLLQEDNPDLIGSEIARWLSTLEISG

SEQ ID NO: 1652 - protein, 277 aa, Synthetic construct
MFHYVDVGPRDGTPVLFLHGNPTSSYVWRNIIPHVAPTHRCIAPDLIGMGKSDKPDLGYFFDDHVRFMDAFIEALGLEDVVLVIHDWGSALGFHWAKRNPERVKGIAFMEFIRPIPTWDEWPEFARETFQAFRTTDVGRKLIIDQNVFIEGTLPMGVVRPLTEVEMDHYREPFLNPVDREPLWRFPNELPIAGEPANIVALVEEYMDWLHQSPVPKLLFWGTPGVLIPPAEAARLAKSLPNCKAVDIGPGLNLLQEDNPDLIGSEIARWLSTLEISG

SEQ ID NO: 1653 - protein, 277 aa, Synthetic construct
MFHYVDVGPRDGTPVLFLHGNPTSSYVWRNIIPHVAPTHRCIAPDLIGMGKSDKPDLGYFFDDHVRFMDAFIEALGLEKVVLVIHDWGSALGFHWAKRNPERVKGIAFMEFIRPIPTWDEWPEFARETFQAFRTTDVGRKLIIDQNVFIEGTLPMGVVRPLTEVEMDHYREPFLNPVDREPLWRFPNELPIAGEPANIVALVEEYMDWLHQSPVPKLLFWGTPGVLIPPAEAARLAKSLPNCKAVDIGPGLNLLQEDNPDLIGSEIARWLSTLEISG

SEQ ID NO: 1654 - protein, 277 aa, Synthetic construct
MFHYVDVGPRDGTPVLFLHGNPTSSYVWRNIIPHVAPTHRCIAPDLIGMGKSDKPDLGYFFDDHVRFMDAFIEALGLEQVVLVIHDWGSALGFHWAKRNPERVKGIAFMEFIRPIPTWDEWPEFARETFQAFRTTDVGRKLIIDQNVFIEGTLPMGVVRPLTEVEMDHYREPFLNPVDREPLWRFPNELPIAGEPANIVALVEEYMDWLHQSPVPKLLFWGTPGVLIPPAEAARLAKSLPNCKAVDIGPGLNLLQEDNPDLIGSEIARWLSTLEISG

SEQ ID NO: 1655 - protein, 277 aa, Synthetic construct
MFHYVDVGPRDGTPVLFLHGNPTSSYVWRNIIPHVAPTHRCIAPDLIGMGKSDKPDLGYFFDDHVRFMDAFIEALGLESVVLVIHDWGSALGFHWAKRNPERVKGIAFMEFIRPIPTWDEWPEFARETFQAFRTTDVGRKLIIDQNVFIEGTLPMGVVRPLTEVEMDHYREPFLNPVDREPLWRFPNELPIAGEPANIVALVEEYMDWLHQSPVPKLLFWGTPGVLIPPAEAARLAKSLPNCKAVDIGPGLNLLQEDNPDLIGSEIARWLSTLEISG

SEQ ID NO: 1656 - protein, 277 aa, Synthetic construct
MFHYVDVGPRDGTPVLFLHGNPTSSYVWRNIIPHVAPTHRCIAPDLIGMGKSDKPDLGYFFDDHVRFMDAFIEALGLEEIVLVIHDWGSALGFHWAKRNPERVKGIAFMEFIRPIPTWDEWPEFARETFQAFRTTDVGRKLIIDQNVFIEGTLPMGVVRPLTEVEMDHYREPFLNPVDREPLWRFPNELPIAGEPANIVALVEEYMDWLHQSPVPKLLFWGTPGVLIPPAEAARLAKSLPNCKAVDIGPGLNLLQEDNPDLIGSEIARWLSTLEISG

SEQ ID NO: 1657 - protein, 277 aa, Synthetic construct
MFHYVDVGPRDGTPVLFLHGNPTSSYVWRNIIPHVAPTHRCIAPDLIGMGKSDKPDLGYFFDDHVRFMDAFIEALGLEELVLVIHDWGSALGFHWAKRNPERVKGIAFMEFIRPIPTWDEWPEFARETFQAFRTTDVGRKLIIDQNVFIEGTLPMGVVRPLTEVEMDHYREPFLNPVDREPLWRFPNELPIAGEPANIVALVEEYMDWLHQSPVPKLLFWGTPGVLIPPAEAARLAKSLPNCKAVDIGPGLNLLQEDNPDLIGSEIARWLSTLEISG

SEQ ID NO: 1658 - protein, 277 aa, Synthetic construct
MFHYVDVGPRDGTPVLFLHGNPTSSYVWRNIIPHVAPTHRCIAPDLIGMGKSDKPDLGYFFDDHVRFMDAFIEALGLEEAVLVIHDWGSALGFHWAKRNPERVKGIAFMEFIRPIPTWDEWPEFARETFQAFRTTDVGRKLIIDQNVFIEGTLPMGVVRPLTEVEMDHYREPFLNPVDREPLWRFPNELPIAGEPANIVALVEEYMDWLHQSPVPKLLFWGTPGVLIPPAEAARLAKSLPNCKAVDIGPGLNLLQEDNPDLIGSEIARWLSTLEISG

SEQ ID NO: 1659 - protein, 277 aa, Synthetic construct
MFHYVDVGPRDGTPVLFLHGNPTSSYVWRNIIPHVAPTHRCIAPDLIGMGKSDKPDLGYFFDDHVRFMDAFIEALGLEEMVLVIHDWGSALGFHWAKRNPERVKGIAFMEFIRPIPTWDEWPEFARETFQAFRTTDVGRKLIIDQNVFIEGTLPMGVVRPLTEVEMDHYREPFLNPVDREPLWRFPNELPIAGEPANIVALVEEYMDWLHQSPVPKLLFWGTPGVLIPPAEAARLAKSLPNCKAVDIGPGLNLLQEDNPDLIGSEIARWLSTLEISG

SEQ ID NO: 1660 - protein, 277 aa, Synthetic construct
MFHYVDVGPRDGTPVLFLHGNPTSSYVWRNIIPHVAPTHRCIAPDLIGMGKSDKPDLGYFFDDHVRFMDAFIEALGLEETVLVIHDWGSALGFHWAKRNPERVKGIAFMEFIRPIPTWDEWPEFARETFQAFRTTDVGRKLIIDQNVFIEGTLPMGVVRPLTEVEMDHYREPFLNPVDREPLWRFPNELPIAGEPANIVALVEEYMDWLHQSPVPKLLFWGTPGVLIPPAEAARLAKSLPNCKAVDIGPGLNLLQEDNPDLIGSEIARWLSTLEISG

SEQ ID NO: 1661 - protein, 277 aa, Synthetic construct
MFHYVDVGPRDGTPVLFLHGNPTSSYVWRNIIPHVAPTHRCIAPDLIGMGKSDKPDLGYFFDDHVRFMDAFIEALGLEEFVLVIHDWGSALGFHWAKRNPERVKGIAFMEFIRPIPTWDEWPEFARETFQAFRTTDVGRKLIIDQNVFIEGTLPMGVVRPLTEVEMDHYREPFLNPVDREPLWRFPNELPIAGEPANIVALVEEYMDWLHQSPVPKLLFWGTPGVLIPPAEAARLAKSLPNCKAVDIGPGLNLLQEDNPDLIGSEIARWLSTLEISG

SEQ ID NO: 1662 - protein, 277 aa, Synthetic construct
MFHYVDVGPRDGTPVLFLHGNPTSSYVWRNIIPHVAPTHRCIAPDLIGMGKSDKPDLGYFFDDHVRFMDAFIEALGLEEVTLVIHDWGSALGFHWAKRNPERVKGIAFMEFIRPIPTWDEWPEFARETFQAFRTTDVGRKLIIDQNVFIEGTLPMGVVRPLTEVEMDHYREPFLNPVDREPLWRFPNELPIAGEPANIVALVEEYMDWLHQSPVPKLLFWGTPGVLIPPAEAARLAKSLPNCKAVDIGPGLNLLQEDNPDLIGSEIARWLSTLEISG

SEQ ID NO: 1663 - protein, 277 aa, Synthetic construct
MFHYVDVGPRDGTPVLFLHGNPTSSYVWRNIIPHVAPTHRCIAPDLIGMGKSDKPDLGYFFDDHVRFMDAFIEALGLEEVILVIHDWGSALGFHWAKRNPERVKGIAFMEFIRPIPTWDEWPEFARETFQAFRTTDVGRKLIIDQNVFIEGTLPMGVVRPLTEVEMDHYREPFLNPVDREPLWRFPNELPIAGEPANIVALVEEYMDWLHQSPVPKLLFWGTPGVLIPPAEAARLAKSLPNCKAVDIGPGLNLLQEDNPDLIGSEIARWLSTLEISG

SEQ ID NO: 1664 - protein, 277 aa, Synthetic construct
MFHYVDVGPRDGTPVLFLHGNPTSSYVWRNIIPHVAPTHRCIAPDLIGMGKSDKPDLGYFFDDHVRFMDAFIEALGLEEVALVIHDWGSALGFHWAKRNPERVKGIAFMEFIRPIPTWDEWPEFARETFQAFRTTDVGRKLIIDQNVFIEGTLPMGVVRPLTEVEMDHYREPFLNPVDREPLWRFPNELPIAGEPANIVALVEEYMDWLHQSPVPKLLFWGTPGVLIPPAEAARLAKSLPNCKAVDIGPGLNLLQEDNPDLIGSEIARWLSTLEISG

SEQ ID NO: 1665 - protein, 277 aa, Synthetic construct
MFHYVDVGPRDGTPVLFLHGNPTSSYVWRNIIPHVAPTHRCIAPDLIGMGKSDKPDLGYFFDDHVRFMDAFIEALGLEEVFLVIHDWGSALGFHWAKRNPERVKGIAFMEFIRPIPTWDEWPEFARETFQAFRTTDVGRKLIIDQNVFIEGTLPMGVVRPLTEVEMDHYREPFLNPVDREPLWRFPNELPIAGEPANIVALVEEYMDWLHQSPVPKLLFWGTPGVLIPPAEAARLAKSLPNCKAVDIGPGLNLLQEDNPDLIGSEIARWLSTLEISG

SEQ ID NO: 1666 - protein, 277 aa, Synthetic construct
MFHYVDVGPRDGTPVLFLHGNPTSSYVWRNIIPHVAPTHRCIAPDLIGMGKSDKPDLGYFFDDHVRFMDAFIEALGLEEVLLVIHDWGSALGFHWAKRNPERVKGIAFMEFIRPIPTWDEWPEFARETFQAFRTTDVGRKLIIDQNVFIEGTLPMGVVRPLTEVEMDHYREPFLNPVDREPLWRFPNELPIAGEPANIVALVEEYMDWLHQSPVPKLLFWGTPGVLIPPAEAARLAKSLPNCKAVDIGPGLNLLQEDNPDLIGSEIARWLSTLEISG

SEQ ID NO: 1667 - protein, 277 aa, Synthetic construct
MFHYVDVGPRDGTPVLFLHGNPTSSYVWRNIIPHVAPTHRCIAPDLIGMGKSDKPDLGYFFDDHVRFMDAFIEALGLEEVSLVIHDWGSALGFHWAKRNPERVKGIAFMEFIRPIPTWDEWPEFARETFQAFRTTDVGRKLIIDQNVFIEGTLPMGVVRPLTEVEMDHYREPFLNPVDREPLWRFPNELPIAGEPANIVALVEEYMDWLHQSPVPKLLFWGTPGVLIPPAEAARLAKSLPNCKAVDIGPGLNLLQEDNPDLIGSEIARWLSTLEISG

SEQ ID NO: 1668 - protein, 277 aa, Synthetic construct
MFHYVDVGPRDGTPVLFLHGNPTSSYVWRNIIPHVAPTHRCIAPDLIGMGKSDKPDLGYFFDDHVRFMDAFIEALGLEEVVMVIHDWGSALGFHWAKRNPERVKGIAFMEFIRPIPTWDEWPEFARETFQAFRTTDVGRKLIIDQNVFIEGTLPMGVVRPLTEVEMDHYREPFLNPVDREPLWRFPNELPIAGEPANIVALVEEYMDWLHQSPVPKLLFWGTPGVLIPPAEAARLAKSLPNCKAVDIGPGLNLLQEDNPDLIGSEIARWLSTLEISG

SEQ ID NO: 1669 - protein, 277 aa, Synthetic construct
MFHYVDVGPRDGTPVLFLHGNPTSSYVWRNIIPHVAPTHRCIAPDLIGMGKSDKPDLGYFFDDHVRFMDAFIEALGLEEVVFVIHDWGSALGFHWAKRNPERVKGIAFMEFIRPIPTWDEWPEFARETFQAFRTTDVGRKLIIDQNVFIEGTLPMGVVRPLTEVEMDHYREPFLNPVDREPLWRFPNELPIAGEPANIVALVEEYMDWLHQSPVPKLLFWGTPGVLIPPAEAARLAKSLPNCKAVDIGPGLNLLQEDNPDLIGSEIARWLSTLEISG

SEQ ID NO: 1670 - protein, 277 aa, Synthetic construct
MFHYVDVGPRDGTPVLFLHGNPTSSYVWRNIIPHVAPTHRCIAPDLIGMGKSDKPDLGYFFDDHVRFMDAFIEALGLEEVVIVIHDWGSALGFHWAKRNPERVKGIAFMEFIRPIPTWDEWPEFARETFQAFRTTDVGRKLIIDQNVFIEGTLPMGVVRPLTEVEMDHYREPFLNPVDREPLWRFPNELPIAGEPANIVALVEEYMDWLHQSPVPKLLFWGTPGVLIPPAEAARLAKSLPNCKAVDIGPGLNLLQEDNPDLIGSEIARWLSTLEISG

SEQ ID NO: 1671 - protein, 277 aa, Synthetic construct
MFHYVDVGPRDGTPVLFLHGNPTSSYVWRNIIPHVAPTHRCIAPDLIGMGKSDKPDLGYFFDDHVRFMDAFIEALGLEEVVVVIHDWGSALGFHWAKRNPERVKGIAFMEFIRPIPTWDEWPEFARETFQAFRTTDVGRKLIIDQNVFIEGTLPMGVVRPLTEVEMDHYREPFLNPVDREPLWRFPNELPIAGEPANIVALVEEYMDWLHQSPVPKLLFWGTPGVLIPPAEAARLAKSLPNCKAVDIGPGLNLLQEDNPDLIGSEIARWLSTLEISG

SEQ ID NO: 1672 - protein, 277 aa, Synthetic construct
MFHYVDVGPRDGTPVLFLHGNPTSSYVWRNIIPHVAPTHRCIAPDLIGMGKSDKPDLGYFFDDHVRFMDAFIEALGLEEVVAVIHDWGSALGFHWAKRNPERVKGIAFMEFIRPIPTWDEWPEFARETFQAFRTTDVGRKLIIDQNVFIEGTLPMGVVRPLTEVEMDHYREPFLNPVDREPLWRFPNELPIAGEPANIVALVEEYMDWLHQSPVPKLLFWGTPGVLIPPAEAARLAKSLPNCKAVDIGPGLNLLQEDNPDLIGSEIARWLSTLEISG

SEQ ID NO: 1673 - protein, 277 aa, Synthetic construct
MFHYVDVGPRDGTPVLFLHGNPTSSYVWRNIIPHVAPTHRCIAPDLIGMGKSDKPDLGYFFDDHVRFMDAFIEALGLEEVVPVIHDWGSALGFHWAKRNPERVKGIAFMEFIRPIPTWDEWPEFARETFQAFRTTDVGRKLIIDQNVFIEGTLPMGVVRPLTEVEMDHYREPFLNPVDREPLWRFPNELPIAGEPANIVALVEEYMDWLHQSPVPKLLFWGTPGVLIPPAEAARLAKSLPNCKAVDIGPGLNLLQEDNPDLIGSEIARWLSTLEISG

SEQ ID NO: 1674 - protein, 277 aa, Synthetic construct
MFHYVDVGPRDGTPVLFLHGNPTSSYVWRNIIPHVAPTHRCIAPDLIGMGKSDKPDLGYFFDDHVRFMDAFIEALGLEEVVLIIHDWGSALGFHWAKRNPERVKGIAFMEFIRPIPTWDEWPEFARETFQAFRTTDVGRKLIIDQNVFIEGTLPMGVVRPLTEVEMDHYREPFLNPVDREPLWRFPNELPIAGEPANIVALVEEYMDWLHQSPVPKLLFWGTPGVLIPPAEAARLAKSLPNCKAVDIGPGLNLLQEDNPDLIGSEIARWLSTLEISG

SEQ ID NO: 1675 - protein, 277 aa, Synthetic construct
MFHYVDVGPRDGTPVLFLHGNPTSSYVWRNIIPHVAPTHRCIAPDLIGMGKSDKPDLGYFFDDHVRFMDAFIEALGLEEVVLAIHDWGSALGFHWAKRNPERVKGIAFMEFIRPIPTWDEWPEFARETFQAFRTTDVGRKLIIDQNVFIEGTLPMGVVRPLTEVEMDHYREPFLNPVDREPLWRFPNELPIAGEPANIVALVEEYMDWLHQSPVPKLLFWGTPGVLIPPAEAARLAKSLPNCKAVDIGPGLNLLQEDNPDLIGSEIARWLSTLEISG

SEQ ID NO: 1676 - protein, 277 aa, Synthetic construct
MFHYVDVGPRDGTPVLFLHGNPTSSYVWRNIIPHVAPTHRCIAPDLIGMGKSDKPDLGYFFDDHVRFMDAFIEALGLEEVVLLIHDWGSALGFHWAKRNPERVKGIAFMEFIRPIPTWDEWPEFARETFQAFRTTDVGRKLIIDQNVFIEGTLPMGVVRPLTEVEMDHYREPFLNPVDREPLWRFPNELPIAGEPANIVALVEEYMDWLHQSPVPKLLFWGTPGVLIPPAEAARLAKSLPNCKAVDIGPGLNLLQEDNPDLIGSEIARWLSTLEISG

SEQ ID NO: 1677 - protein, 277 aa, Synthetic construct
MFHYVDVGPRDGTPVLFLHGNPTSSYVWRNIIPHVAPTHRCIAPDLIGMGKSDKPDLGYFFDDHVRFMDAFIEALGLEEVVLMIHDWGSALGFHWAKRNPERVKGIAFMEFIRPIPTWDEWPEFARETFQAFRTTDVGRKLIIDQNVFIEGTLPMGVVRPLTEVEMDHYREPFLNPVDREPLWRFPNELPIAGEPANIVALVEEYMDWLHQSPVPKLLFWGTPGVLIPPAEAARLAKSLPNCKAVDIGPGLNLLQEDNPDLIGSEIARWLSTLEISG

SEQ ID NO: 1678 - protein, 277 aa, Synthetic construct
MFHYVDVGPRDGTPVLFLHGNPTSSYVWRNIIPHVAPTHRCIAPDLIGMGKSDKPDLGYFFDDHVRFMDAFIEALGLEEVVLCIHDWGSALGFHWAKRNPERVKGIAFMEFIRPIPTWDEWPEFARETFQAFRTTDVGRKLIIDQNVFIEGTLPMGVVRPLTEVEMDHYREPFLNPVDREPLWRFPNELPIAGEPANIVALVEEYMDWLHQSPVPKLLFWGTPGVLIPPAEAARLAKSLPNCKAVDIGPGLNLLQEDNPDLIGSEIARWLSTLEISG

SEQ ID NO: 1679 - protein, 277 aa, Synthetic construct
MFHYVDVGPRDGTPVLFLHGNPTSSYVWRNIIPHVAPTHRCIAPDLIGMGKSDKPDLGYFFDDHVRFMDAFIEALGLEEVVLFIHDWGSALGFHWAKRNPERVKGIAFMEFIRPIPTWDEWPEFARETFQAFRTTDVGRKLIIDQNVFIEGTLPMGVVRPLTEVEMDHYREPFLNPVDREPLWRFPNELPIAGEPANIVALVEEYMDWLHQSPVPKLLFWGTPGVLIPPAEAARLAKSLPNCKAVDIGPGLNLLQEDNPDLIGSEIARWLSTLEISG

SEQ ID NO: 1680 - protein, 277 aa, Synthetic construct
MFHYVDVGPRDGTPVLFLHGNPTSSYVWRNIIPHVAPTHRCIAPDLIGMGKSDKPDLGYFFDDHVRFMDAFIEALGLEEVVLVVHDWGSALGFHWAKRNPERVKGIAFMEFIRPIPTWDEWPEFARETFQAFRTTDVGRKLIIDQNVFIEGTLPMGVVRPLTEVEMDHYREPFLNPVDREPLWRFPNELPIAGEPANIVALVEEYMDWLHQSPVPKLLFWGTPGVLIPPAEAARLAKSLPNCKAVDIGPGLNLLQEDNPDLIGSEIARWLSTLEISG

SEQ ID NO: 1681 - protein, 277 aa, Synthetic construct
MFHYVDVGPRDGTPVLFLHGNPTSSYVWRNIIPHVAPTHRCIAPDLIGMGKSDKPDLGYFFDDHVRFMDAFIEALGLEEVVLVLHDWGSALGFHWAKRNPERVKGIAFMEFIRPIPTWDEWPEFARETFQAFRTTDVGRKLIIDQNVFIEGTLPMGVVRPLTEVEMDHYREPFLNPVDREPLWRFPNELPIAGEPANIVALVEEYMDWLHQSPVPKLLFWGTPGVLIPPAEAARLAKSLPNCKAVDIGPGLNLLQEDNPDLIGSEIARWLSTLEISG

SEQ ID NO: 1682 - protein, 277 aa, Synthetic construct
MFHYVDVGPRDGTPVLFLHGNPTSSYVWRNIIPHVAPTHRCIAPDLIGMGKSDKPDLGYFFDDHVRFMDAFIEALGLEEVVLVMHDWGSALGFHWAKRNPERVKGIAFMEFIRPIPTWDEWPEFARETFQAFRTTDVGRKLIIDQNVFIEGTLPMGVVRPLTEVEMDHYREPFLNPVDREPLWRFPNELPIAGEPANIVALVEEYMDWLHQSPVPKLLFWGTPGVLIPPAEAARLAKSLPNCKAVDIGPGLNLLQEDNPDLIGSEIARWLSTLEISG

SEQ ID NO: 1683 - protein, 277 aa, Synthetic construct
MFHYVDVGPRDGTPVLFLHGNPTSSYVWRNIIPHVAPTHRCIAPDLIGMGKSDKPDLGYFFDDHVRFMDAFIEALGLEEVVLVGHDWGSALGFHWAKRNPERVKGIAFMEFIRPIPTWDEWPEFARETFQAFRTTDVGRKLIIDQNVFIEGTLPMGVVRPLTEVEMDHYREPFLNPVDREPLWRFPNELPIAGEPANIVALVEEYMDWLHQSPVPKLLFWGTPGVLIPPAEAARLAKSLPNCKAVDIGPGLNLLQEDNPDLIGSEIARWLSTLEISG

SEQ ID NO: 1684 - protein, 277 aa, Synthetic construct
MFHYVDVGPRDGTPVLFLHGNPTSSYVWRNIIPHVAPTHRCIAPDLIGMGKSDKPDLGYFFDDHVRFMDAFIEALGLEEVVLVAHDWGSALGFHWAKRNPERVKGIAFMEFIRPIPTWDEWPEFARETFQAFRTTDVGRKLIIDQNVFIEGTLPMGVVRPLTEVEMDHYREPFLNPVDREPLWRFPNELPIAGEPANIVALVEEYMDWLHQSPVPKLLFWGTPGVLIPPAEAARLAKSLPNCKAVDIGPGLNLLQEDNPDLIGSEIARWLSTLEISG

SEQ ID NO: 1685 - protein, 277 aa, Synthetic construct
MFHYVDVGPRDGTPVLFLHGNPTSSYVWRNIIPHVAPTHRCIAPDLIGMGKSDKPDLGYFFDDHVRFMDAFIEALGLEEVVLVCHDWGSALGFHWAKRNPERVKGIAFMEFIRPIPTWDEWPEFARETFQAFRTTDVGRKLIIDQNVFIEGTLPMGVVRPLTEVEMDHYREPFLNPVDREPLWRFPNELPIAGEPANIVALVEEYMDWLHQSPVPKLLFWGTPGVLIPPAEAARLAKSLPNCKAVDIGPGLNLLQEDNPDLIGSEIARWLSTLEISG

SEQ ID NO: 1686 - protein, 277 aa, Synthetic construct
MFHYVDVGPRDGTPVLFLHGNPTSSYVWRNIIPHVAPTHRCIAPDLIGMGKSDKPDLGYFFDDHVRFMDAFIEALGLEEVVLVIQDWGSALGFHWAKRNPERVKGIAFMEFIRPIPTWDEWPEFARETFQAFRTTDVGRKLIIDQNVFIEGTLPMGVVRPLTEVEMDHYREPFLNPVDREPLWRFPNELPIAGEPANIVALVEEYMDWLHQSPVPKLLFWGTPGVLIPPAEAARLAKSLPNCKAVDIGPGLNLLQEDNPDLIGSEIARWLSTLEISG

SEQ ID NO: 1687 - protein, 277 aa, Synthetic construct
MFHYVDVGPRDGTPVLFLHGNPTSSYVWRNIIPHVAPTHRCIAPDLIGMGKSDKPDLGYFFDDHVRFMDAFIEALGLEEVVLVINDWGSALGFHWAKRNPERVKGIAFMEFIRPIPTWDEWPEFARETFQAFRTTDVGRKLIIDQNVFIEGTLPMGVVRPLTEVEMDHYREPFLNPVDREPLWRFPNELPIAGEPANIVALVEEYMDWLHQSPVPKLLFWGTPGVLIPPAEAARLAKSLPNCKAVDIGPGLNLLQEDNPDLIGSEIARWLSTLEISG

SEQ ID NO: 1688 - protein, 277 aa, Synthetic construct
MFHYVDVGPRDGTPVLFLHGNPTSSYVWRNIIPHVAPTHRCIAPDLIGMGKSDKPDLGYFFDDHVRFMDAFIEALGLEEVVLVISDWGSALGFHWAKRNPERVKGIAFMEFIRPIPTWDEWPEFARETFQAFRTTDVGRKLIIDQNVFIEGTLPMGVVRPLTEVEMDHYREPFLNPVDREPLWRFPNELPIAGEPANIVALVEEYMDWLHQSPVPKLLFWGTPGVLIPPAEAARLAKSLPNCKAVDIGPGLNLLQEDNPDLIGSEIARWLSTLEISG

SEQ ID NO: 1689 - protein, 277 aa, Synthetic construct
MFHYVDVGPRDGTPVLFLHGNPTSSYVWRNIIPHVAPTHRCIAPDLIGMGKSDKPDLGYFFDDHVRFMDAFIEALGLEEVVLVITDWGSALGFHWAKRNPERVKGIAFMEFIRPIPTWDEWPEFARETFQAFRTTDVGRKLIIDQNVFIEGTLPMGVVRPLTEVEMDHYREPFLNPVDREPLWRFPNELPIAGEPANIVALVEEYMDWLHQSPVPKLLFWGTPGVLIPPAEAARLAKSLPNCKAVDIGPGLNLLQEDNPDLIGSEIARWLSTLEISG

SEQ ID NO: 1690 - protein, 277 aa, Synthetic construct
MFHYVDVGPRDGTPVLFLHGNPTSSYVWRNIIPHVAPTHRCIAPDLIGMGKSDKPDLGYFFDDHVRFMDAFIEALGLEEVVLVIPDWGSALGFHWAKRNPERVKGIAFMEFIRPIPTWDEWPEFARETFQAFRTTDVGRKLIIDQNVFIEGTLPMGVVRPLTEVEMDHYREPFLNPVDREPLWRFPNELPIAGEPANIVALVEEYMDWLHQSPVPKLLFWGTPGVLIPPAEAARLAKSLPNCKAVDIGPGLNLLQEDNPDLIGSEIARWLSTLEISG

SEQ ID NO: 1691 - protein, 277 aa, Synthetic construct
MFHYVDVGPRDGTPVLFLHGNPTSSYVWRNIIPHVAPTHRCIAPDLIGMGKSDKPDLGYFFDDHVRFMDAFIEALGLEEVVLVIADWGSALGFHWAKRNPERVKGIAFMEFIRPIPTWDEWPEFARETFQAFRTTDVGRKLIIDQNVFIEGTLPMGVVRPLTEVEMDHYREPFLNPVDREPLWRFPNELPIAGEPANIVALVEEYMDWLHQSPVPKLLFWGTPGVLIPPAEAARLAKSLPNCKAVDIGPGLNLLQEDNPDLIGSEIARWLSTLEISG

SEQ ID NO: 1692 - protein, 277 aa, Synthetic construct
MFHYVDVGPRDGTPVLFLHGNPTSSYVWRNIIPHVAPTHRCIAPDLIGMGKSDKPDLGYFFDDHVRFMDAFIEALGLEEVVLVIHGWGSALGFHWAKRNPERVKGIAFMEFIRPIPTWDEWPEFARETFQAFRTTDVGRKLIIDQNVFIEGTLPMGVVRPLTEVEMDHYREPFLNPVDREPLWRFPNELPIAGEPANIVALVEEYMDWLHQSPVPKLLFWGTPGVLIPPAEAARLAKSLPNCKAVDIGPGLNLLQEDNPDLIGSEIARWLSTLEISG

SEQ ID NO: 1693 - protein, 277 aa, Synthetic construct
MFHYVDVGPRDGTPVLFLHGNPTSSYVWRNIIPHVAPTHRCIAPDLIGMGKSDKPDLGYFFDDHVRFMDAFIEALGLEEVVLVIHEWGSALGFHWAKRNPERVKGIAFMEFIRPIPTWDEWPEFARETFQAFRTTDVGRKLIIDQNVFIEGTLPMGVVRPLTEVEMDHYREPFLNPVDREPLWRFPNELPIAGEPANIVALVEEYMDWLHQSPVPKLLFWGTPGVLIPPAEAARLAKSLPNCKAVDIGPGLNLLQEDNPDLIGSEIARWLSTLEISG

SEQ ID NO: 1694 - protein, 277 aa, Synthetic construct
MFHYVDVGPRDGTPVLFLHGNPTSSYVWRNIIPHVAPTHRCIAPDLIGMGKSDKPDLGYFFDDHVRFMDAFIEALGLEEVVLVIHNWGSALGFHWAKRNPERVKGIAFMEFIRPIPTWDEWPEFARETFQAFRTTDVGRKLIIDQNVFIEGTLPMGVVRPLTEVEMDHYREPFLNPVDREPLWRFPNELPIAGEPANIVALVEEYMDWLHQSPVPKLLFWGTPGVLIPPAEAARLAKSLPNCKAVDIGPGLNLLQEDNPDLIGSEIARWLSTLEISG

SEQ ID NO: 1695 - protein, 277 aa, Synthetic construct
MFHYVDVGPRDGTPVLFLHGNPTSSYVWRNIIPHVAPTHRCIAPDLIGMGKSDKPDLGYFFDDHVRFMDAFIEALGLEEVVLVIHSWGSALGFHWAKRNPERVKGIAFMEFIRPIPTWDEWPEFARETFQAFRTTDVGRKLIIDQNVFIEGTLPMGVVRPLTEVEMDHYREPFLNPVDREPLWRFPNELPIAGEPANIVALVEEYMDWLHQSPVPKLLFWGTPGVLIPPAEAARLAKSLPNCKAVDIGPGLNLLQEDNPDLIGSEIARWLSTLEISG

SEQ ID NO: 1696 - protein, 277 aa, Synthetic construct
MFHYVDVGPRDGTPVLFLHGNPTSSYVWRNIIPHVAPTHRCIAPDLIGMGKSDKPDLGYFFDDHVRFMDAFIEALGLEEVVLVIHAWGSALGFHWAKRNPERVKGIAFMEFIRPIPTWDEWPEFARETFQAFRTTDVGRKLIIDQNVFIEGTLPMGVVRPLTEVEMDHYREPFLNPVDREPLWRFPNELPIAGEPANIVALVEEYMDWLHQSPVPKLLFWGTPGVLIPPAEAARLAKSLPNCKAVDIGPGLNLLQEDNPDLIGSEIARWLSTLEISG

SEQ ID NO: 1697 - protein, 277 aa, Synthetic construct
MFHYVDVGPRDGTPVLFLHGNPTSSYVWRNIIPHVAPTHRCIAPDLIGMGKSDKPDLGYFFDDHVRFMDAFIEALGLEEVVLVIHHWGSALGFHWAKRNPERVKGIAFMEFIRPIPTWDEWPEFARETFQAFRTTDVGRKLIIDQNVFIEGTLPMGVVRPLTEVEMDHYREPFLNPVDREPLWRFPNELPIAGEPANIVALVEEYMDWLHQSPVPKLLFWGTPGVLIPPAEAARLAKSLPNCKAVDIGPGLNLLQEDNPDLIGSEIARWLSTLEISG

SEQ ID NO: 1698 - protein, 277 aa, Synthetic construct
MFHYVDVGPRDGTPVLFLHGNPTSSYVWRNIIPHVAPTHRCIAPDLIGMGKSDKPDLGYFFDDHVRFMDAFIEALGLEEVVLVIHDFGSALGFHWAKRNPERVKGIAFMEFIRPIPTWDEWPEFARETFQAFRTTDVGRKLIIDQNVFIEGTLPMGVVRPLTEVEMDHYREPFLNPVDREPLWRFPNELPIAGEPANIVALVEEYMDWLHQSPVPKLLFWGTPGVLIPPAEAARLAKSLPNCKAVDIGPGLNLLQEDNPDLIGSEIARWLSTLEISG

SEQ ID NO: 1699 - protein, 277 aa, Synthetic construct
MFHYVDVGPRDGTPVLFLHGNPTSSYVWRNIIPHVAPTHRCIAPDLIGMGKSDKPDLGYFFDDHVRFMDAFIEALGLEEVVLVIHDYGSALGFHWAKRNPERVKGIAFMEFIRPIPTWDEWPEFARETFQAFRTTDVGRKLIIDQNVFIEGTLPMGVVRPLTEVEMDHYREPFLNPVDREPLWRFPNELPIAGEPANIVALVEEYMDWLHQSPVPKLLFWGTPGVLIPPAEAARLAKSLPNCKAVDIGPGLNLLQEDNPDLIGSEIARWLSTLEISG

SEQ ID NO: 1700 - protein, 277 aa, Synthetic construct
MFHYVDVGPRDGTPVLFLHGNPTSSYVWRNIIPHVAPTHRCIAPDLIGMGKSDKPDLGYFFDDHVRFMDAFIEALGLEEVVLVIHDLGSALGFHWAKRNPERVKGIAFMEFIRPIPTWDEWPEFARETFQAFRTTDVGRKLIIDQNVFIEGTLPMGVVRPLTEVEMDHYREPFLNPVDREPLWRFPNELPIAGEPANIVALVEEYMDWLHQSPVPKLLFWGTPGVLIPPAEAARLAKSLPNCKAVDIGPGLNLLQEDNPDLIGSEIARWLSTLEISG

SEQ ID NO: 1701 - protein, 277 aa, Synthetic construct
MFHYVDVGPRDGTPVLFLHGNPTSSYVWRNIIPHVAPTHRCIAPDLIGMGKSDKPDLGYFFDDHVRFMDAFIEALGLEEVVLVIHDSGSALGFHWAKRNPERVKGIAFMEFIRPIPTWDEWPEFARETFQAFRTTDVGRKLIIDQNVFIEGTLPMGVVRPLTEVEMDHYREPFLNPVDREPLWRFPNELPIAGEPANIVALVEEYMDWLHQSPVPKLLFWGTPGVLIPPAEAARLAKSLPNCKAVDIGPGLNLLQEDNPDLIGSEIARWLSTLEISG

SEQ ID NO: 1702 - protein, 277 aa, Synthetic construct
MFHYVDVGPRDGTPVLFLHGNPTSSYVWRNIIPHVAPTHRCIAPDLIGMGKSDKPDLGYFFDDHVRFMDAFIEALGLEEVVLVIHDIGSALGFHWAKRNPERVKGIAFMEFIRPIPTWDEWPEFARETFQAFRTTDVGRKLIIDQNVFIEGTLPMGVVRPLTEVEMDHYREPFLNPVDREPLWRFPNELPIAGEPANIVALVEEYMDWLHQSPVPKLLFWGTPGVLIPPAEAARLAKSLPNCKAVDIGPGLNLLQEDNPDLIGSEIARWLSTLEISG

SEQ ID NO: 1703 - protein, 277 aa, Synthetic construct
MFHYVDVGPRDGTPVLFLHGNPTSSYVWRNIIPHVAPTHRCIAPDLIGMGKSDKPDLGYFFDDHVRFMDAFIEALGLEEVVLVIHDMGSALGFHWAKRNPERVKGIAFMEFIRPIPTWDEWPEFARETFQAFRTTDVGRKLIIDQNVFIEGTLPMGVVRPLTEVEMDHYREPFLNPVDREPLWRFPNELPIAGEPANIVALVEEYMDWLHQSPVPKLLFWGTPGVLIPPAEAARLAKSLPNCKAVDIGPGLNLLQEDNPDLIGSEIARWLSTLEISG

SEQ ID NO: 1704 - protein, 277 aa, Synthetic construct
MFHYVDVGPRDGTPVLFLHGNPTSSYVWRNIIPHVAPTHRCIAPDLIGMGKSDKPDLGYFFDDHVRFMDAFIEALGLEEVVLVIHDWASALGFHWAKRNPERVKGIAFMEFIRPIPTWDEWPEFARETFQAFRTTDVGRKLIIDQNVFIEGTLPMGVVRPLTEVEMDHYREPFLNPVDREPLWRFPNELPIAGEPANIVALVEEYMDWLHQSPVPKLLFWGTPGVLIPPAEAARLAKSLPNCKAVDIGPGLNLLQEDNPDLIGSEIARWLSTLEISG

SEQ ID NO: 1705 - protein, 277 aa, Synthetic construct
MFHYVDVGPRDGTPVLFLHGNPTSSYVWRNIIPHVAPTHRCIAPDLIGMGKSDKPDLGYFFDDHVRFMDAFIEALGLEEVVLVIHDWSSALGFHWAKRNPERVKGIAFMEFIRPIPTWDEWPEFARETFQAFRTTDVGRKLIIDQNVFIEGTLPMGVVRPLTEVEMDHYREPFLNPVDREPLWRFPNELPIAGEPANIVALVEEYMDWLHQSPVPKLLFWGTPGVLIPPAEAARLAKSLPNCKAVDIGPGLNLLQEDNPDLIGSEIARWLSTLEISG

SEQ ID NO: 1706 - protein, 277 aa, Synthetic construct
MFHYVDVGPRDGTPVLFLHGNPTSSYVWRNIIPHVAPTHRCIAPDLIGMGKSDKPDLGYFFDDHVRFMDAFIEALGLEEVVLVIHDWCSALGFHWAKRNPERVKGIAFMEFIRPIPTWDEWPEFARETFQAFRTTDVGRKLIIDQNVFIEGTLPMGVVRPLTEVEMDHYREPFLNPVDREPLWRFPNELPIAGEPANIVALVEEYMDWLHQSPVPKLLFWGTPGVLIPPAEAARLAKSLPNCKAVDIGPGLNLLQEDNPDLIGSEIARWLSTLEISG

SEQ ID NO: 1707 - protein, 277 aa, Synthetic construct
MFHYVDVGPRDGTPVLFLHGNPTSSYVWRNIIPHVAPTHRCIAPDLIGMGKSDKPDLGYFFDDHVRFMDAFIEALGLEEVVLVIHDWDSALGFHWAKRNPERVKGIAFMEFIRPIPTWDEWPEFARETFQAFRTTDVGRKLIIDQNVFIEGTLPMGVVRPLTEVEMDHYREPFLNPVDREPLWRFPNELPIAGEPANIVALVEEYMDWLHQSPVPKLLFWGTPGVLIPPAEAARLAKSLPNCKAVDIGPGLNLLQEDNPDLIGSEIARWLSTLEISG

SEQ ID NO: 1708 - protein, 277 aa, Synthetic construct
MFHYVDVGPRDGTPVLFLHGNPTSSYVWRNIIPHVAPTHRCIAPDLIGMGKSDKPDLGYFFDDHVRFMDAFIEALGLEEVVLVIHDWTSALGFHWAKRNPERVKGIAFMEFIRPIPTWDEWPEFARETFQAFRTTDVGRKLIIDQNVFIEGTLPMGVVRPLTEVEMDHYREPFLNPVDREPLWRFPNELPIAGEPANIVALVEEYMDWLHQSPVPKLLFWGTPGVLIPPAEAARLAKSLPNCKAVDIGPGLNLLQEDNPDLIGSEIARWLSTLEISG

SEQ ID NO: 1709 - protein, 277 aa, Synthetic construct
MFHYVDVGPRDGTPVLFLHGNPTSSYVWRNIIPHVAPTHRCIAPDLIGMGKSDKPDLGYFFDDHVRFMDAFIEALGLEEVVLVIHDWVSALGFHWAKRNPERVKGIAFMEFIRPIPTWDEWPEFARETFQAFRTTDVGRKLIIDQNVFIEGTLPMGVVRPLTEVEMDHYREPFLNPVDREPLWRFPNELPIAGEPANIVALVEEYMDWLHQSPVPKLLFWGTPGVLIPPAEAARLAKSLPNCKAVDIGPGLNLLQEDNPDLIGSEIARWLSTLEISG

SEQ ID NO: 1710 - protein, 277 aa, Synthetic construct
MFHYVDVGPRDGTPVLFLHGNPTSSYVWRNIIPHVAPTHRCIAPDLIGMGKSDKPDLGYFFDDHVRFMDAFIEALGLEEVVLVIHDWGTALGFHWAKRNPERVKGIAFMEFIRPIPTWDEWPEFARETFQAFRTTDVGRKLIIDQNVFIEGTLPMGVVRPLTEVEMDHYREPFLNPVDREPLWRFPNELPIAGEPANIVALVEEYMDWLHQSPVPKLLFWGTPGVLIPPAEAARLAKSLPNCKAVDIGPGLNLLQEDNPDLIGSEIARWLSTLEISG

SEQ ID NO: 1711 - protein, 277 aa, Synthetic construct
MFHYVDVGPRDGTPVLFLHGNPTSSYVWRNIIPHVAPTHRCIAPDLIGMGKSDKPDLGYFFDDHVRFMDAFIEALGLEEVVLVIHDWGAALGFHWAKRNPERVKGIAFMEFIRPIPTWDEWPEFARETFQAFRTTDVGRKLIIDQNVFIEGTLPMGVVRPLTEVEMDHYREPFLNPVDREPLWRFPNELPIAGEPANIVALVEEYMDWLHQSPVPKLLFWGTPGVLIPPAEAARLAKSLPNCKAVDIGPGLNLLQEDNPDLIGSEIARWLSTLEISG

SEQ ID NO: 1712 - protein, 277 aa, Synthetic construct
MFHYVDVGPRDGTPVLFLHGNPTSSYVWRNIIPHVAPTHRCIAPDLIGMGKSDKPDLGYFFDDHVRFMDAFIEALGLEEVVLVIHDWGGALGFHWAKRNPERVKGIAFMEFIRPIPTWDEWPEFARETFQAFRTTDVGRKLIIDQNVFIEGTLPMGVVRPLTEVEMDHYREPFLNPVDREPLWRFPNELPIAGEPANIVALVEEYMDWLHQSPVPKLLFWGTPGVLIPPAEAARLAKSLPNCKAVDIGPGLNLLQEDNPDLIGSEIARWLSTLEISG

SEQ ID NO: 1713 - protein, 277 aa, Synthetic construct
MFHYVDVGPRDGTPVLFLHGNPTSSYVWRNIIPHVAPTHRCIAPDLIGMGKSDKPDLGYFFDDHVRFMDAFIEALGLEEVVLVIHDWGCALGFHWAKRNPERVKGIAFMEFIRPIPTWDEWPEFARETFQAFRTTDVGRKLIIDQNVFIEGTLPMGVVRPLTEVEMDHYREPFLNPVDREPLWRFPNELPIAGEPANIVALVEEYMDWLHQSPVPKLLFWGTPGVLIPPAEAARLAKSLPNCKAVDIGPGLNLLQEDNPDLIGSEIARWLSTLEISG

SEQ ID NO: 1714 - protein, 277 aa, Synthetic construct
MFHYVDVGPRDGTPVLFLHGNPTSSYVWRNIIPHVAPTHRCIAPDLIGMGKSDKPDLGYFFDDHVRFMDAFIEALGLEEVVLVIHDWGNALGFHWAKRNPERVKGIAFMEFIRPIPTWDEWPEFARETFQAFRTTDVGRKLIIDQNVFIEGTLPMGVVRPLTEVEMDHYREPFLNPVDREPLWRFPNELPIAGEPANIVALVEEYMDWLHQSPVPKLLFWGTPGVLIPPAEAARLAKSLPNCKAVDIGPGLNLLQEDNPDLIGSEIARWLSTLEISG

SEQ ID NO: 1715 - protein, 277 aa, Synthetic construct
MFHYVDVGPRDGTPVLFLHGNPTSSYVWRNIIPHVAPTHRCIAPDLIGMGKSDKPDLGYFFDDHVRFMDAFIEALGLEEVVLVIHDWGVALGFHWAKRNPERVKGIAFMEFIRPIPTWDEWPEFARETFQAFRTTDVGRKLIIDQNVFIEGTLPMGVVRPLTEVEMDHYREPFLNPVDREPLWRFPNELPIAGEPANIVALVEEYMDWLHQSPVPKLLFWGTPGVLIPPAEAARLAKSLPNCKAVDIGPGLNLLQEDNPDLIGSEIARWLSTLEISG

SEQ ID NO: 1716 - protein, 277 aa, Synthetic construct
MFHYVDVGPRDGTPVLFLHGNPTSSYVWRNIIPHVAPTHRCIAPDLIGMGKSDKPDLGYFFDDHVRFMDAFIEALGLEEVVLVIHDWGSGLGFHWAKRNPERVKGIAFMEFIRPIPTWDEWPEFARETFQAFRTTDVGRKLIIDQNVFIEGTLPMGVVRPLTEVEMDHYREPFLNPVDREPLWRFPNELPIAGEPANIVALVEEYMDWLHQSPVPKLLFWGTPGVLIPPAEAARLAKSLPNCKAVDIGPGLNLLQEDNPDLIGSEIARWLSTLEISG

SEQ ID NO: 1717 - protein, 277 aa, Synthetic construct
MFHYVDVGPRDGTPVLFLHGNPTSSYVWRNIIPHVAPTHRCIAPDLIGMGKSDKPDLGYFFDDHVRFMDAFIEALGLEEVVLVIHDWGSSLGFHWAKRNPERVKGIAFMEFIRPIPTWDEWPEFARETFQAFRTTDVGRKLIIDQNVFIEGTLPMGVVRPLTEVEMDHYREPFLNPVDREPLWRFPNELPIAGEPANIVALVEEYMDWLHQSPVPKLLFWGTPGVLIPPAEAARLAKSLPNCKAVDIGPGLNLLQEDNPDLIGSEIARWLSTLEISG

SEQ ID NO: 1718 - protein, 277 aa, Synthetic construct
MFHYVDVGPRDGTPVLFLHGNPTSSYVWRNIIPHVAPTHRCIAPDLIGMGKSDKPDLGYFFDDHVRFMDAFIEALGLEEVVLVIHDWGSVLGFHWAKRNPERVKGIAFMEFIRPIPTWDEWPEFARETFQAFRTTDVGRKLIIDQNVFIEGTLPMGVVRPLTEVEMDHYREPFLNPVDREPLWRFPNELPIAGEPANIVALVEEYMDWLHQSPVPKLLFWGTPGVLIPPAEAARLAKSLPNCKAVDIGPGLNLLQEDNPDLIGSEIARWLSTLEISG

SEQ ID NO: 1719 - protein, 277 aa, Synthetic construct
MFHYVDVGPRDGTPVLFLHGNPTSSYVWRNIIPHVAPTHRCIAPDLIGMGKSDKPDLGYFFDDHVRFMDAFIEALGLEEVVLVIHDWGSPLGFHWAKRNPERVKGIAFMEFIRPIPTWDEWPEFARETFQAFRTTDVGRKLIIDQNVFIEGTLPMGVVRPLTEVEMDHYREPFLNPVDREPLWRFPNELPIAGEPANIVALVEEYMDWLHQSPVPKLLFWGTPGVLIPPAEAARLAKSLPNCKAVDIGPGLNLLQEDNPDLIGSEIARWLSTLEISG

SEQ ID NO: 1720 - protein, 277 aa, Synthetic construct
MFHYVDVGPRDGTPVLFLHGNPTSSYVWRNIIPHVAPTHRCIAPDLIGMGKSDKPDLGYFFDDHVRFMDAFIEALGLEEVVLVIHDWGSTLGFHWAKRNPERVKGIAFMEFIRPIPTWDEWPEFARETFQAFRTTDVGRKLIIDQNVFIEGTLPMGVVRPLTEVEMDHYREPFLNPVDREPLWRFPNELPIAGEPANIVALVEEYMDWLHQSPVPKLLFWGTPGVLIPPAEAARLAKSLPNCKAVDIGPGLNLLQEDNPDLIGSEIARWLSTLEISG

SEQ ID NO: 1721 - protein, 277 aa, Synthetic construct
MFHYVDVGPRDGTPVLFLHGNPTSSYVWRNIIPHVAPTHRCIAPDLIGMGKSDKPDLGYFFDDHVRFMDAFIEALGLEEVVLVIHDWGSILGFHWAKRNPERVKGIAFMEFIRPIPTWDEWPEFARETFQAFRTTDVGRKLIIDQNVFIEGTLPMGVVRPLTEVEMDHYREPFLNPVDREPLWRFPNELPIAGEPANIVALVEEYMDWLHQSPVPKLLFWGTPGVLIPPAEAARLAKSLPNCKAVDIGPGLNLLQEDNPDLIGSEIARWLSTLEISG

SEQ ID NO: 1722 - protein, 277 aa, Synthetic construct
MFHYVDVGPRDGTPVLFLHGNPTSSYVWRNIIPHVAPTHRCIAPDLIGMGKSDKPDLGYFFDDHVRFMDAFIEALGLEEVVLVIHDWGSAIGFHWAKRNPERVKGIAFMEFIRPIPTWDEWPEFARETFQAFRTTDVGRKLIIDQNVFIEGTLPMGVVRPLTEVEMDHYREPFLNPVDREPLWRFPNELPIAGEPANIVALVEEYMDWLHQSPVPKLLFWGTPGVLIPPAEAARLAKSLPNCKAVDIGPGLNLLQEDNPDLIGSEIARWLSTLEISG

SEQ ID NO: 1723 - protein, 277 aa, Synthetic construct
MFHYVDVGPRDGTPVLFLHGNPTSSYVWRNIIPHVAPTHRCIAPDLIGMGKSDKPDLGYFFDDHVRFMDAFIEALGLEEVVLVIHDWGSAVGFHWAKRNPERVKGIAFMEFIRPIPTWDEWPEFARETFQAFRTTDVGRKLIIDQNVFIEGTLPMGVVRPLTEVEMDHYREPFLNPVDREPLWRFPNELPIAGEPANIVALVEEYMDWLHQSPVPKLLFWGTPGVLIPPAEAARLAKSLPNCKAVDIGPGLNLLQEDNPDLIGSEIARWLSTLEISG

SEQ ID NO: 1724 - protein, 277 aa, Synthetic construct
MFHYVDVGPRDGTPVLFLHGNPTSSYVWRNIIPHVAPTHRCIAPDLIGMGKSDKPDLGYFFDDHVRFMDAFIEALGLEEVVLVIHDWGSAFGFHWAKRNPERVKGIAFMEFIRPIPTWDEWPEFARETFQAFRTTDVGRKLIIDQNVFIEGTLPMGVVRPLTEVEMDHYREPFLNPVDREPLWRFPNELPIAGEPANIVALVEEYMDWLHQSPVPKLLFWGTPGVLIPPAEAARLAKSLPNCKAVDIGPGLNLLQEDNPDLIGSEIARWLSTLEISG

SEQ ID NO: 1725 - protein, 277 aa, Synthetic construct
MFHYVDVGPRDGTPVLFLHGNPTSSYVWRNIIPHVAPTHRCIAPDLIGMGKSDKPDLGYFFDDHVRFMDAFIEALGLEEVVLVIHDWGSAMGFHWAKRNPERVKGIAFMEFIRPIPTWDEWPEFARETFQAFRTTDVGRKLIIDQNVFIEGTLPMGVVRPLTEVEMDHYREPFLNPVDREPLWRFPNELPIAGEPANIVALVEEYMDWLHQSPVPKLLFWGTPGVLIPPAEAARLAKSLPNCKAVDIGPGLNLLQEDNPDLIGSEIARWLSTLEISG

SEQ ID NO: 1726 - protein, 277 aa, Synthetic construct
MFHYVDVGPRDGTPVLFLHGNPTSSYVWRNIIPHVAPTHRCIAPDLIGMGKSDKPDLGYFFDDHVRFMDAFIEALGLEEVVLVIHDWGSAAGFHWAKRNPERVKGIAFMEFIRPIPTWDEWPEFARETFQAFRTTDVGRKLIIDQNVFIEGTLPMGVVRPLTEVEMDHYREPFLNPVDREPLWRFPNELPIAGEPANIVALVEEYMDWLHQSPVPKLLFWGTPGVLIPPAEAARLAKSLPNCKAVDIGPGLNLLQEDNPDLIGSEIARWLSTLEISG

SEQ ID NO: 1727 - protein, 277 aa, Synthetic construct
MFHYVDVGPRDGTPVLFLHGNPTSSYVWRNIIPHVAPTHRCIAPDLIGMGKSDKPDLGYFFDDHVRFMDAFIEALGLEEVVLVIHDWGSATGFHWAKRNPERVKGIAFMEFIRPIPTWDEWPEFARETFQAFRTTDVGRKLIIDQNVFIEGTLPMGVVRPLTEVEMDHYREPFLNPVDREPLWRFPNELPIAGEPANIVALVEEYMDWLHQSPVPKLLFWGTPGVLIPPAEAARLAKSLPNCKAVDIGPGLNLLQEDNPDLIGSEIARWLSTLEISG

SEQ ID NO: 1728 - protein, 277 aa, Synthetic construct
MFHYVDVGPRDGTPVLFLHGNPTSSYVWRNIIPHVAPTHRCIAPDLIGMGKSDKPDLGYFFDDHVRFMDAFIEALGLEEVVLVIHDWGSALAFHWAKRNPERVKGIAFMEFIRPIPTWDEWPEFARETFQAFRTTDVGRKLIIDQNVFIEGTLPMGVVRPLTEVEMDHYREPFLNPVDREPLWRFPNELPIAGEPANIVALVEEYMDWLHQSPVPKLLFWGTPGVLIPPAEAARLAKSLPNCKAVDIGPGLNLLQEDNPDLIGSEIARWLSTLEISG

SEQ ID NO: 1729 - protein, 277 aa, Synthetic construct
MFHYVDVGPRDGTPVLFLHGNPTSSYVWRNIIPHVAPTHRCIAPDLIGMGKSDKPDLGYFFDDHVRFMDAFIEALGLEEVVLVIHDWGSALSFHWAKRNPERVKGIAFMEFIRPIPTWDEWPEFARETFQAFRTTDVGRKLIIDQNVFIEGTLPMGVVRPLTEVEMDHYREPFLNPVDREPLWRFPNELPIAGEPANIVALVEEYMDWLHQSPVPKLLFWGTPGVLIPPAEAARLAKSLPNCKAVDIGPGLNLLQEDNPDLIGSEIARWLSTLEISG

SEQ ID NO: 1730 - protein, 277 aa, Synthetic construct
MFHYVDVGPRDGTPVLFLHGNPTSSYVWRNIIPHVAPTHRCIAPDLIGMGKSDKPDLGYFFDDHVRFMDAFIEALGLEEVVLVIHDWGSALTFHWAKRNPERVKGIAFMEFIRPIPTWDEWPEFARETFQAFRTTDVGRKLIIDQNVFIEGTLPMGVVRPLTEVEMDHYREPFLNPVDREPLWRFPNELPIAGEPANIVALVEEYMDWLHQSPVPKLLFWGTPGVLIPPAEAARLAKSLPNCKAVDIGPGLNLLQEDNPDLIGSEIARWLSTLEISG

SEQ ID NO: 1731 - protein, 277 aa, Synthetic construct
MFHYVDVGPRDGTPVLFLHGNPTSSYVWRNIIPHVAPTHRCIAPDLIGMGKSDKPDLGYFFDDHVRFMDAFIEALGLEEVVLVIHDWGSALCFHWAKRNPERVKGIAFMEFIRPIPTWDEWPEFARETFQAFRTTDVGRKLIIDQNVFIEGTLPMGVVRPLTEVEMDHYREPFLNPVDREPLWRFPNELPIAGEPANIVALVEEYMDWLHQSPVPKLLFWGTPGVLIPPAEAARLAKSLPNCKAVDIGPGLNLLQEDNPDLIGSEIARWLSTLEISG

SEQ ID NO: 1732 - protein, 277 aa, Synthetic construct
MFHYVDVGPRDGTPVLFLHGNPTSSYVWRNIIPHVAPTHRCIAPDLIGMGKSDKPDLGYFFDDHVRFMDAFIEALGLEEVVLVIHDWGSALVFHWAKRNPERVKGIAFMEFIRPIPTWDEWPEFARETFQAFRTTDVGRKLIIDQNVFIEGTLPMGVVRPLTEVEMDHYREPFLNPVDREPLWRFPNELPIAGEPANIVALVEEYMDWLHQSPVPKLLFWGTPGVLIPPAEAARLAKSLPNCKAVDIGPGLNLLQEDNPDLIGSEIARWLSTLEISG

SEQ ID NO: 1733 - protein, 277 aa, Synthetic construct
MFHYVDVGPRDGTPVLFLHGNPTSSYVWRNIIPHVAPTHRCIAPDLIGMGKSDKPDLGYFFDDHVRFMDAFIEALGLEEVVLVIHDWGSALNFHWAKRNPERVKGIAFMEFIRPIPTWDEWPEFARETFQAFRTTDVGRKLIIDQNVFIEGTLPMGVVRPLTEVEMDHYREPFLNPVDREPLWRFPNELPIAGEPANIVALVEEYMDWLHQSPVPKLLFWGTPGVLIPPAEAARLAKSLPNCKAVDIGPGLNLLQEDNPDLIGSEIARWLSTLEISG

SEQ ID NO: 1734 - protein, 277 aa, Synthetic construct
MFHYVDVGPRDGTPVLFLHGNPTSSYVWRNIIPHVAPTHRCIAPDLIGMGKSDKPDLGYFFDDHVRFMDAFIEALGLEEVVLVIHDWGSALGLHWAKRNPERVKGIAFMEFIRPIPTWDEWPEFARETFQAFRTTDVGRKLIIDQNVFIEGTLPMGVVRPLTEVEMDHYREPFLNPVDREPLWRFPNELPIAGEPANIVALVEEYMDWLHQSPVPKLLFWGTPGVLIPPAEAARLAKSLPNCKAVDIGPGLNLLQEDNPDLIGSEIARWLSTLEISG

SEQ ID NO: 1735 - protein, 277 aa, Synthetic construct
MFHYVDVGPRDGTPVLFLHGNPTSSYVWRNIIPHVAPTHRCIAPDLIGMGKSDKPDLGYFFDDHVRFMDAFIEALGLEEVVLVIHDWGSALGMHWAKRNPERVKGIAFMEFIRPIPTWDEWPEFARETFQAFRTTDVGRKLIIDQNVFIEGTLPMGVVRPLTEVEMDHYREPFLNPVDREPLWRFPNELPIAGEPANIVALVEEYMDWLHQSPVPKLLFWGTPGVLIPPAEAARLAKSLPNCKAVDIGPGLNLLQEDNPDLIGSEIARWLSTLEISG

SEQ ID NO: 1736 - protein, 277 aa, Synthetic construct
MFHYVDVGPRDGTPVLFLHGNPTSSYVWRNIIPHVAPTHRCIAPDLIGMGKSDKPDLGYFFDDHVRFMDAFIEALGLEEVVLVIHDWGSALGYHWAKRNPERVKGIAFMEFIRPIPTWDEWPEFARETFQAFRTTDVGRKLIIDQNVFIEGTLPMGVVRPLTEVEMDHYREPFLNPVDREPLWRFPNELPIAGEPANIVALVEEYMDWLHQSPVPKLLFWGTPGVLIPPAEAARLAKSLPNCKAVDIGPGLNLLQEDNPDLIGSEIARWLSTLEISG

SEQ ID NO: 1737 - protein, 277 aa, Synthetic construct
MFHYVDVGPRDGTPVLFLHGNPTSSYVWRNIIPHVAPTHRCIAPDLIGMGKSDKPDLGYFFDDHVRFMDAFIEALGLEEVVLVIHDWGSALGIHWAKRNPERVKGIAFMEFIRPIPTWDEWPEFARETFQAFRTTDVGRKLIIDQNVFIEGTLPMGVVRPLTEVEMDHYREPFLNPVDREPLWRFPNELPIAGEPANIVALVEEYMDWLHQSPVPKLLFWGTPGVLIPPAEAARLAKSLPNCKAVDIGPGLNLLQEDNPDLIGSEIARWLSTLEISG

SEQ ID NO: 1738 - protein, 277 aa, Synthetic construct
MFHYVDVGPRDGTPVLFLHGNPTSSYVWRNIIPHVAPTHRCIAPDLIGMGKSDKPDLGYFFDDHVRFMDAFIEALGLEEVVLVIHDWGSALGVHWAKRNPERVKGIAFMEFIRPIPTWDEWPEFARETFQAFRTTDVGRKLIIDQNVFIEGTLPMGVVRPLTEVEMDHYREPFLNPVDREPLWRFPNELPIAGEPANIVALVEEYMDWLHQSPVPKLLFWGTPGVLIPPAEAARLAKSLPNCKAVDIGPGLNLLQEDNPDLIGSEIARWLSTLEISG

SEQ ID NO: 1739 - protein, 277 aa, Synthetic construct
MFHYVDVGPRDGTPVLFLHGNPTSSYVWRNIIPHVAPTHRCIAPDLIGMGKSDKPDLGYFFDDHVRFMDAFIEALGLEEVVLVIHDWGSALGAHWAKRNPERVKGIAFMEFIRPIPTWDEWPEFARETFQAFRTTDVGRKLIIDQNVFIEGTLPMGVVRPLTEVEMDHYREPFLNPVDREPLWRFPNELPIAGEPANIVALVEEYMDWLHQSPVPKLLFWGTPGVLIPPAEAARLAKSLPNCKAVDIGPGLNLLQEDNPDLIGSEIARWLSTLEISG

SEQ ID NO: 1740 - protein, 277 aa, Synthetic construct
MFHYVDVGPRDGTPVLFLHGNPTSSYVWRNIIPHVAPTHRCIAPDLIGMGKSDKPDLGYFFDDHVRFMDAFIEALGLEEVVLVIHDWGSALGFNWAKRNPERVKGIAFMEFIRPIPTWDEWPEFARETFQAFRTTDVGRKLIIDQNVFIEGTLPMGVVRPLTEVEMDHYREPFLNPVDREPLWRFPNELPIAGEPANIVALVEEYMDWLHQSPVPKLLFWGTPGVLIPPAEAARLAKSLPNCKAVDIGPGLNLLQEDNPDLIGSEIARWLSTLEISG

SEQ ID NO: 1741 - protein, 277 aa, Synthetic construct
MFHYVDVGPRDGTPVLFLHGNPTSSYVWRNIIPHVAPTHRCIAPDLIGMGKSDKPDLGYFFDDHVRFMDAFIEALGLEEVVLVIHDWGSALGFDWAKRNPERVKGIAFMEFIRPIPTWDEWPEFARETFQAFRTTDVGRKLIIDQNVFIEGTLPMGVVRPLTEVEMDHYREPFLNPVDREPLWRFPNELPIAGEPANIVALVEEYMDWLHQSPVPKLLFWGTPGVLIPPAEAARLAKSLPNCKAVDIGPGLNLLQEDNPDLIGSEIARWLSTLEISG

SEQ ID NO: 1742 - protein, 277 aa, Synthetic construct
MFHYVDVGPRDGTPVLFLHGNPTSSYVWRNIIPHVAPTHRCIAPDLIGMGKSDKPDLGYFFDDHVRFMDAFIEALGLEEVVLVIHDWGSALGFAWAKRNPERVKGIAFMEFIRPIPTWDEWPEFARETFQAFRTTDVGRKLIIDQNVFIEGTLPMGVVRPLTEVEMDHYREPFLNPVDREPLWRFPNELPIAGEPANIVALVEEYMDWLHQSPVPKLLFWGTPGVLIPPAEAARLAKSLPNCKAVDIGPGLNLLQEDNPDLIGSEIARWLSTLEISG

SEQ ID NO: 1743 - protein, 277 aa, Synthetic construct
MFHYVDVGPRDGTPVLFLHGNPTSSYVWRNIIPHVAPTHRCIAPDLIGMGKSDKPDLGYFFDDHVRFMDAFIEALGLEEVVLVIHDWGSALGFYWAKRNPERVKGIAFMEFIRPIPTWDEWPEFARETFQAFRTTDVGRKLIIDQNVFIEGTLPMGVVRPLTEVEMDHYREPFLNPVDREPLWRFPNELPIAGEPANIVALVEEYMDWLHQSPVPKLLFWGTPGVLIPPAEAARLAKSLPNCKAVDIGPGLNLLQEDNPDLIGSEIARWLSTLEISG

SEQ ID NO: 1744 - protein, 277 aa, Synthetic construct
MFHYVDVGPRDGTPVLFLHGNPTSSYVWRNIIPHVAPTHRCIAPDLIGMGKSDKPDLGYFFDDHVRFMDAFIEALGLEEVVLVIHDWGSALGFRWAKRNPERVKGIAFMEFIRPIPTWDEWPEFARETFQAFRTTDVGRKLIIDQNVFIEGTLPMGVVRPLTEVEMDHYREPFLNPVDREPLWRFPNELPIAGEPANIVALVEEYMDWLHQSPVPKLLFWGTPGVLIPPAEAARLAKSLPNCKAVDIGPGLNLLQEDNPDLIGSEIARWLSTLEISG

SEQ ID NO: 1745 - protein, 277 aa, Synthetic construct
MFHYVDVGPRDGTPVLFLHGNPTSSYVWRNIIPHVAPTHRCIAPDLIGMGKSDKPDLGYFFDDHVRFMDAFIEALGLEEVVLVIHDWGSALGFQWAKRNPERVKGIAFMEFIRPIPTWDEWPEFARETFQAFRTTDVGRKLIIDQNVFIEGTLPMGVVRPLTEVEMDHYREPFLNPVDREPLWRFPNELPIAGEPANIVALVEEYMDWLHQSPVPKLLFWGTPGVLIPPAEAARLAKSLPNCKAVDIGPGLNLLQEDNPDLIGSEIARWLSTLEISG

SEQ ID NO: 1746 - protein, 277 aa, Synthetic construct
MFHYVDVGPRDGTPVLFLHGNPTSSYVWRNIIPHVAPTHRCIAPDLIGMGKSDKPDLGYFFDDHVRFMDAFIEALGLEEVVLVIHDWGSALGFHYAKRNPERVKGIAFMEFIRPIPTWDEWPEFARETFQAFRTTDVGRKLIIDQNVFIEGTLPMGVVRPLTEVEMDHYREPFLNPVDREPLWRFPNELPIAGEPANIVALVEEYMDWLHQSPVPKLLFWGTPGVLIPPAEAARLAKSLPNCKAVDIGPGLNLLQEDNPDLIGSEIARWLSTLEISG

SEQ ID NO: 1747 - protein, 277 aa, Synthetic construct
MFHYVDVGPRDGTPVLFLHGNPTSSYVWRNIIPHVAPTHRCIAPDLIGMGKSDKPDLGYFFDDHVRFMDAFIEALGLEEVVLVIHDWGSALGFHFAKRNPERVKGIAFMEFIRPIPTWDEWPEFARETFQAFRTTDVGRKLIIDQNVFIEGTLPMGVVRPLTEVEMDHYREPFLNPVDREPLWRFPNELPIAGEPANIVALVEEYMDWLHQSPVPKLLFWGTPGVLIPPAEAARLAKSLPNCKAVDIGPGLNLLQEDNPDLIGSEIARWLSTLEISG

SEQ ID NO: 1748 - protein, 277 aa, Synthetic construct
MFHYVDVGPRDGTPVLFLHGNPTSSYVWRNIIPHVAPTHRCIAPDLIGMGKSDKPDLGYFFDDHVRFMDAFIEALGLEEVVLVIHDWGSALGFHLAKRNPERVKGIAFMEFIRPIPTWDEWPEFARETFQAFRTTDVGRKLIIDQNVFIEGTLPMGVVRPLTEVEMDHYREPFLNPVDREPLWRFPNELPIAGEPANIVALVEEYMDWLHQSPVPKLLFWGTPGVLIPPAEAARLAKSLPNCKAVDIGPGLNLLQEDNPDLIGSEIARWLSTLEISG

SEQ ID NO: 1749 - protein, 277 aa, Synthetic construct
MFHYVDVGPRDGTPVLFLHGNPTSSYVWRNIIPHVAPTHRCIAPDLIGMGKSDKPDLGYFFDDHVRFMDAFIEALGLEEVVLVIHDWGSALGFHVAKRNPERVKGIAFMEFIRPIPTWDEWPEFARETFQAFRTTDVGRKLIIDQNVFIEGTLPMGVVRPLTEVEMDHYREPFLNPVDREPLWRFPNELPIAGEPANIVALVEEYMDWLHQSPVPKLLFWGTPGVLIPPAEAARLAKSLPNCKAVDIGPGLNLLQEDNPDLIGSEIARWLSTLEISG

SEQ ID NO: 1750 - protein, 277 aa, Synthetic construct
MFHYVDVGPRDGTPVLFLHGNPTSSYVWRNIIPHVAPTHRCIAPDLIGMGKSDKPDLGYFFDDHVRFMDAFIEALGLEEVVLVIHDWGSALGFHIAKRNPERVKGIAFMEFIRPIPTWDEWPEFARETFQAFRTTDVGRKLIIDQNVFIEGTLPMGVVRPLTEVEMDHYREPFLNPVDREPLWRFPNELPIAGEPANIVALVEEYMDWLHQSPVPKLLFWGTPGVLIPPAEAARLAKSLPNCKAVDIGPGLNLLQEDNPDLIGSEIARWLSTLEISG

SEQ ID NO: 1751 - protein, 277 aa, Synthetic construct
MFHYVDVGPRDGTPVLFLHGNPTSSYVWRNIIPHVAPTHRCIAPDLIGMGKSDKPDLGYFFDDHVRFMDAFIEALGLEEVVLVIHDWGSALGFHHAKRNPERVKGIAFMEFIRPIPTWDEWPEFARETFQAFRTTDVGRKLIIDQNVFIEGTLPMGVVRPLTEVEMDHYREPFLNPVDREPLWRFPNELPIAGEPANIVALVEEYMDWLHQSPVPKLLFWGTPGVLIPPAEAARLAKSLPNCKAVDIGPGLNLLQEDNPDLIGSEIARWLSTLEISG

SEQ ID NO: 1752 - protein, 277 aa, Synthetic construct
MFHYVDVGPRDGTPVLFLHGNPTSSYVWRNIIPHVAPTHRCIAPDLIGMGKSDKPDLGYFFDDHVRFMDAFIEALGLEEVVLVIHDWGSALGFHWVKRNPERVKGIAFMEFIRPIPTWDEWPEFARETFQAFRTTDVGRKLIIDQNVFIEGTLPMGVVRPLTEVEMDHYREPFLNPVDREPLWRFPNELPIAGEPANIVALVEEYMDWLHQSPVPKLLFWGTPGVLIPPAEAARLAKSLPNCKAVDIGPGLNLLQEDNPDLIGSEIARWLSTLEISG

SEQ ID NO: 1753 - protein, 277 aa, Synthetic construct
MFHYVDVGPRDGTPVLFLHGNPTSSYVWRNIIPHVAPTHRCIAPDLIGMGKSDKPDLGYFFDDHVRFMDAFIEALGLEEVVLVIHDWGSALGFHWSKRNPERVKGIAFMEFIRPIPTWDEWPEFARETFQAFRTTDVGRKLIIDQNVFIEGTLPMGVVRPLTEVEMDHYREPFLNPVDREPLWRFPNELPIAGEPANIVALVEEYMDWLHQSPVPKLLFWGTPGVLIPPAEAARLAKSLPNCKAVDIGPGLNLLQEDNPDLIGSEIARWLSTLEISG

SEQ ID NO: 1754 - protein, 277 aa, Synthetic construct
MFHYVDVGPRDGTPVLFLHGNPTSSYVWRNIIPHVAPTHRCIAPDLIGMGKSDKPDLGYFFDDHVRFMDAFIEALGLEEVVLVIHDWGSALGFHWGKRNPERVKGIAFMEFIRPIPTWDEWPEFARETFQAFRTTDVGRKLIIDQNVFIEGTLPMGVVRPLTEVEMDHYREPFLNPVDREPLWRFPNELPIAGEPANIVALVEEYMDWLHQSPVPKLLFWGTPGVLIPPAEAARLAKSLPNCKAVDIGPGLNLLQEDNPDLIGSEIARWLSTLEISG

SEQ ID NO: 1755 - protein, 277 aa, Synthetic construct
MFHYVDVGPRDGTPVLFLHGNPTSSYVWRNIIPHVAPTHRCIAPDLIGMGKSDKPDLGYFFDDHVRFMDAFIEALGLEEVVLVIHDWGSALGFHWTKRNPERVKGIAFMEFIRPIPTWDEWPEFARETFQAFRTTDVGRKLIIDQNVFIEGTLPMGVVRPLTEVEMDHYREPFLNPVDREPLWRFPNELPIAGEPANIVALVEEYMDWLHQSPVPKLLFWGTPGVLIPPAEAARLAKSLPNCKAVDIGPGLNLLQEDNPDLIGSEIARWLSTLEISG

SEQ ID NO: 1756 - protein, 277 aa, Synthetic construct
MFHYVDVGPRDGTPVLFLHGNPTSSYVWRNIIPHVAPTHRCIAPDLIGMGKSDKPDLGYFFDDHVRFMDAFIEALGLEEVVLVIHDWGSALGFHWCKRNPERVKGIAFMEFIRPIPTWDEWPEFARETFQAFRTTDVGRKLIIDQNVFIEGTLPMGVVRPLTEVEMDHYREPFLNPVDREPLWRFPNELPIAGEPANIVALVEEYMDWLHQSPVPKLLFWGTPGVLIPPAEAARLAKSLPNCKAVDIGPGLNLLQEDNPDLIGSEIARWLSTLEISG

SEQ ID NO: 1757 - protein, 277 aa, Synthetic construct
MFHYVDVGPRDGTPVLFLHGNPTSSYVWRNIIPHVAPTHRCIAPDLIGMGKSDKPDLGYFFDDHVRFMDAFIEALGLEEVVLVIHDWGSALGFHWLKRNPERVKGIAFMEFIRPIPTWDEWPEFARETFQAFRTTDVGRKLIIDQNVFIEGTLPMGVVRPLTEVEMDHYREPFLNPVDREPLWRFPNELPIAGEPANIVALVEEYMDWLHQSPVPKLLFWGTPGVLIPPAEAARLAKSLPNCKAVDIGPGLNLLQEDNPDLIGSEIARWLSTLEISG

SEQ ID NO: 1758 - protein, 277 aa, Synthetic construct
MFHYVDVGPRDGTPVLFLHGNPTSSYVWRNIIPHVAPTHRCIAPDLIGMGKSDKPDLGYFFDDHVRFMDAFIEALGLEEVVLVIHDWGSALGFHWARRNPERVKGIAFMEFIRPIPTWDEWPEFARETFQAFRTTDVGRKLIIDQNVFIEGTLPMGVVRPLTEVEMDHYREPFLNPVDREPLWRFPNELPIAGEPANIVALVEEYMDWLHQSPVPKLLFWGTPGVLIPPAEAARLAKSLPNCKAVDIGPGLNLLQEDNPDLIGSEIARWLSTLEISG

SEQ ID NO: 1759 - protein, 277 aa, Synthetic construct
MFHYVDVGPRDGTPVLFLHGNPTSSYVWRNIIPHVAPTHRCIAPDLIGMGKSDKPDLGYFFDDHVRFMDAFIEALGLEEVVLVIHDWGSALGFHWAARNPERVKGIAFMEFIRPIPTWDEWPEFARETFQAFRTTDVGRKLIIDQNVFIEGTLPMGVVRPLTEVEMDHYREPFLNPVDREPLWRFPNELPIAGEPANIVALVEEYMDWLHQSPVPKLLFWGTPGVLIPPAEAARLAKSLPNCKAVDIGPGLNLLQEDNPDLIGSEIARWLSTLEISG

SEQ ID NO: 1760 - protein, 277 aa, Synthetic construct
MFHYVDVGPRDGTPVLFLHGNPTSSYVWRNIIPHVAPTHRCIAPDLIGMGKSDKPDLGYFFDDHVRFMDAFIEALGLEEVVLVIHDWGSALGFHWANRNPERVKGIAFMEFIRPIPTWDEWPEFARETFQAFRTTDVGRKLIIDQNVFIEGTLPMGVVRPLTEVEMDHYREPFLNPVDREPLWRFPNELPIAGEPANIVALVEEYMDWLHQSPVPKLLFWGTPGVLIPPAEAARLAKSLPNCKAVDIGPGLNLLQEDNPDLIGSEIARWLSTLEISG

SEQ ID NO: 1761 - protein, 277 aa, Synthetic construct
MFHYVDVGPRDGTPVLFLHGNPTSSYVWRNIIPHVAPTHRCIAPDLIGMGKSDKPDLGYFFDDHVRFMDAFIEALGLEEVVLVIHDWGSALGFHWAHRNPERVKGIAFMEFIRPIPTWDEWPEFARETFQAFRTTDVGRKLIIDQNVFIEGTLPMGVVRPLTEVEMDHYREPFLNPVDREPLWRFPNELPIAGEPANIVALVEEYMDWLHQSPVPKLLFWGTPGVLIPPAEAARLAKSLPNCKAVDIGPGLNLLQEDNPDLIGSEIARWLSTLEISG

SEQ ID NO: 1762 - protein, 277 aa, Synthetic construct
MFHYVDVGPRDGTPVLFLHGNPTSSYVWRNIIPHVAPTHRCIAPDLIGMGKSDKPDLGYFFDDHVRFMDAFIEALGLEEVVLVIHDWGSALGFHWASRNPERVKGIAFMEFIRPIPTWDEWPEFARETFQAFRTTDVGRKLIIDQNVFIEGTLPMGVVRPLTEVEMDHYREPFLNPVDREPLWRFPNELPIAGEPANIVALVEEYMDWLHQSPVPKLLFWGTPGVLIPPAEAARLAKSLPNCKAVDIGPGLNLLQEDNPDLIGSEIARWLSTLEISG

SEQ ID NO: 1763 - protein, 277 aa, Synthetic construct
MFHYVDVGPRDGTPVLFLHGNPTSSYVWRNIIPHVAPTHRCIAPDLIGMGKSDKPDLGYFFDDHVRFMDAFIEALGLEEVVLVIHDWGSALGFHWAQRNPERVKGIAFMEFIRPIPTWDEWPEFARETFQAFRTTDVGRKLIIDQNVFIEGTLPMGVVRPLTEVEMDHYREPFLNPVDREPLWRFPNELPIAGEPANIVALVEEYMDWLHQSPVPKLLFWGTPGVLIPPAEAARLAKSLPNCKAVDIGPGLNLLQEDNPDLIGSEIARWLSTLEISG

SEQ ID NO: 1764 - protein, 277 aa, Synthetic construct
MFHYVDVGPRDGTPVLFLHGNPTSSYVWRNIIPHVAPTHRCIAPDLIGMGKSDKPDLGYFFDDHVRFMDAFIEALGLEEVVLVIHDWGSALGFHWAKKNPERVKGIAFMEFIRPIPTWDEWPEFARETFQAFRTTDVGRKLIIDQNVFIEGTLPMGVVRPLTEVEMDHYREPFLNPVDREPLWRFPNELPIAGEPANIVALVEEYMDWLHQSPVPKLLFWGTPGVLIPPAEAARLAKSLPNCKAVDIGPGLNLLQEDNPDLIGSEIARWLSTLEISG

SEQ ID NO: 1765 - protein, 277 aa, Synthetic construct
MFHYVDVGPRDGTPVLFLHGNPTSSYVWRNIIPHVAPTHRCIAPDLIGMGKSDKPDLGYFFDDHVRFMDAFIEALGLEEVVLVIHDWGSALGFHWAKQNPERVKGIAFMEFIRPIPTWDEWPEFARETFQAFRTTDVGRKLIIDQNVFIEGTLPMGVVRPLTEVEMDHYREPFLNPVDREPLWRFPNELPIAGEPANIVALVEEYMDWLHQSPVPKLLFWGTPGVLIPPAEAARLAKSLPNCKAVDIGPGLNLLQEDNPDLIGSEIARWLSTLEISG

SEQ ID NO: 1766 - protein, 277 aa, Synthetic construct
MFHYVDVGPRDGTPVLFLHGNPTSSYVWRNIIPHVAPTHRCIAPDLIGMGKSDKPDLGYFFDDHVRFMDAFIEALGLEEVVLVIHDWGSALGFHWAKANPERVKGIAFMEFIRPIPTWDEWPEFARETFQAFRTTDVGRKLIIDQNVFIEGTLPMGVVRPLTEVEMDHYREPFLNPVDREPLWRFPNELPIAGEPANIVALVEEYMDWLHQSPVPKLLFWGTPGVLIPPAEAARLAKSLPNCKAVDIGPGLNLLQEDNPDLIGSEIARWLSTLEISG

SEQ ID NO: 1767 - protein, 277 aa, Synthetic construct
MFHYVDVGPRDGTPVLFLHGNPTSSYVWRNIIPHVAPTHRCIAPDLIGMGKSDKPDLGYFFDDHVRFMDAFIEALGLEEVVLVIHDWGSALGFHWAKTNPERVKGIAFMEFIRPIPTWDEWPEFARETFQAFRTTDVGRKLIIDQNVFIEGTLPMGVVRPLTEVEMDHYREPFLNPVDREPLWRFPNELPIAGEPANIVALVEEYMDWLHQSPVPKLLFWGTPGVLIPPAEAARLAKSLPNCKAVDIGPGLNLLQEDNPDLIGSEIARWLSTLEISG

SEQ ID NO: 1768 - protein, 277 aa, Synthetic construct
MFHYVDVGPRDGTPVLFLHGNPTSSYVWRNIIPHVAPTHRCIAPDLIGMGKSDKPDLGYFFDDHVRFMDAFIEALGLEEVVLVIHDWGSALGFHWAKHNPERVKGIAFMEFIRPIPTWDEWPEFARETFQAFRTTDVGRKLIIDQNVFIEGTLPMGVVRPLTEVEMDHYREPFLNPVDREPLWRFPNELPIAGEPANIVALVEEYMDWLHQSPVPKLLFWGTPGVLIPPAEAARLAKSLPNCKAVDIGPGLNLLQEDNPDLIGSEIARWLSTLEISG

SEQ ID NO: 1769 - protein, 277 aa, Synthetic construct
MFHYVDVGPRDGTPVLFLHGNPTSSYVWRNIIPHVAPTHRCIAPDLIGMGKSDKPDLGYFFDDHVRFMDAFIEALGLEEVVLVIHDWGSALGFHWAKSNPERVKGIAFMEFIRPIPTWDEWPEFARETFQAFRTTDVGRKLIIDQNVFIEGTLPMGVVRPLTEVEMDHYREPFLNPVDREPLWRFPNELPIAGEPANIVALVEEYMDWLHQSPVPKLLFWGTPGVLIPPAEAARLAKSLPNCKAVDIGPGLNLLQEDNPDLIGSEIARWLSTLEISG

SEQ ID NO: 1770 - protein, 277 aa, Synthetic construct
MFHYVDVGPRDGTPVLFLHGNPTSSYVWRNIIPHVAPTHRCIAPDLIGMGKSDKPDLGYFFDDHVRFMDAFIEALGLEEVVLVIHDWGSALGFHWAKRHPERVKGIAFMEFIRPIPTWDEWPEFARETFQAFRTTDVGRKLIIDQNVFIEGTLPMGVVRPLTEVEMDHYREPFLNPVDREPLWRFPNELPIAGEPANIVALVEEYMDWLHQSPVPKLLFWGTPGVLIPPAEAARLAKSLPNCKAVDIGPGLNLLQEDNPDLIGSEIARWLSTLEISG

SEQ ID NO: 1771 - protein, 277 aa, Synthetic construct
MFHYVDVGPRDGTPVLFLHGNPTSSYVWRNIIPHVAPTHRCIAPDLIGMGKSDKPDLGYFFDDHVRFMDAFIEALGLEEVVLVIHDWGSALGFHWAKRYPERVKGIAFMEFIRPIPTWDEWPEFARETFQAFRTTDVGRKLIIDQNVFIEGTLPMGVVRPLTEVEMDHYREPFLNPVDREPLWRFPNELPIAGEPANIVALVEEYMDWLHQSPVPKLLFWGTPGVLIPPAEAARLAKSLPNCKAVDIGPGLNLLQEDNPDLIGSEIARWLSTLEISG

SEQ ID NO: 1772 - protein, 277 aa, Synthetic construct
MFHYVDVGPRDGTPVLFLHGNPTSSYVWRNIIPHVAPTHRCIAPDLIGMGKSDKPDLGYFFDDHVRFMDAFIEALGLEEVVLVIHDWGSALGFHWAKRRPERVKGIAFMEFIRPIPTWDEWPEFARETFQAFRTTDVGRKLIIDQNVFIEGTLPMGVVRPLTEVEMDHYREPFLNPVDREPLWRFPNELPIAGEPANIVALVEEYMDWLHQSPVPKLLFWGTPGVLIPPAEAARLAKSLPNCKAVDIGPGLNLLQEDNPDLIGSEIARWLSTLEISG

SEQ ID NO: 1773 - protein, 277 aa, Synthetic construct
MFHYVDVGPRDGTPVLFLHGNPTSSYVWRNIIPHVAPTHRCIAPDLIGMGKSDKPDLGYFFDDHVRFMDAFIEALGLEEVVLVIHDWGSALGFHWAKRFPERVKGIAFMEFIRPIPTWDEWPEFARETFQAFRTTDVGRKLIIDQNVFIEGTLPMGVVRPLTEVEMDHYREPFLNPVDREPLWRFPNELPIAGEPANIVALVEEYMDWLHQSPVPKLLFWGTPGVLIPPAEAARLAKSLPNCKAVDIGPGLNLLQEDNPDLIGSEIARWLSTLEISG

SEQ ID NO: 1774 - protein, 277 aa, Synthetic construct
MFHYVDVGPRDGTPVLFLHGNPTSSYVWRNIIPHVAPTHRCIAPDLIGMGKSDKPDLGYFFDDHVRFMDAFIEALGLEEVVLVIHDWGSALGFHWAKRQPERVKGIAFMEFIRPIPTWDEWPEFARETFQAFRTTDVGRKLIIDQNVFIEGTLPMGVVRPLTEVEMDHYREPFLNPVDREPLWRFPNELPIAGEPANIVALVEEYMDWLHQSPVPKLLFWGTPGVLIPPAEAARLAKSLPNCKAVDIGPGLNLLQEDNPDLIGSEIARWLSTLEISG

SEQ ID NO: 1775 - protein, 277 aa, Synthetic construct
MFHYVDVGPRDGTPVLFLHGNPTSSYVWRNIIPHVAPTHRCIAPDLIGMGKSDKPDLGYFFDDHVRFMDAFIEALGLEEVVLVIHDWGSALGFHWAKRSPERVKGIAFMEFIRPIPTWDEWPEFARETFQAFRTTDVGRKLIIDQNVFIEGTLPMGVVRPLTEVEMDHYREPFLNPVDREPLWRFPNELPIAGEPANIVALVEEYMDWLHQSPVPKLLFWGTPGVLIPPAEAARLAKSLPNCKAVDIGPGLNLLQEDNPDLIGSEIARWLSTLEISG

SEQ ID NO: 1776 - protein, 277 aa, Synthetic construct
MFHYVDVGPRDGTPVLFLHGNPTSSYVWRNIIPHVAPTHRCIAPDLIGMGKSDKPDLGYFFDDHVRFMDAFIEALGLEEVVLVIHDWGSALGFHWAKRNAERVKGIAFMEFIRPIPTWDEWPEFARETFQAFRTTDVGRKLIIDQNVFIEGTLPMGVVRPLTEVEMDHYREPFLNPVDREPLWRFPNELPIAGEPANIVALVEEYMDWLHQSPVPKLLFWGTPGVLIPPAEAARLAKSLPNCKAVDIGPGLNLLQEDNPDLIGSEIARWLSTLEISG

SEQ ID NO: 1777 - protein, 277 aa, Synthetic construct
MFHYVDVGPRDGTPVLFLHGNPTSSYVWRNIIPHVAPTHRCIAPDLIGMGKSDKPDLGYFFDDHVRFMDAFIEALGLEEVVLVIHDWGSALGFHWAKRNRERVKGIAFMEFIRPIPTWDEWPEFARETFQAFRTTDVGRKLIIDQNVFIEGTLPMGVVRPLTEVEMDHYREPFLNPVDREPLWRFPNELPIAGEPANIVALVEEYMDWLHQSPVPKLLFWGTPGVLIPPAEAARLAKSLPNCKAVDIGPGLNLLQEDNPDLIGSEIARWLSTLEISG

SEQ ID NO: 1778 - protein, 277 aa, Synthetic construct
MFHYVDVGPRDGTPVLFLHGNPTSSYVWRNIIPHVAPTHRCIAPDLIGMGKSDKPDLGYFFDDHVRFMDAFIEALGLEEVVLVIHDWGSALGFHWAKRNQERVKGIAFMEFIRPIPTWDEWPEFARETFQAFRTTDVGRKLIIDQNVFIEGTLPMGVVRPLTEVEMDHYREPFLNPVDREPLWRFPNELPIAGEPANIVALVEEYMDWLHQSPVPKLLFWGTPGVLIPPAEAARLAKSLPNCKAVDIGPGLNLLQEDNPDLIGSEIARWLSTLEISG

SEQ ID NO: 1779 - protein, 277 aa, Synthetic construct
MFHYVDVGPRDGTPVLFLHGNPTSSYVWRNIIPHVAPTHRCIAPDLIGMGKSDKPDLGYFFDDHVRFMDAFIEALGLEEVVLVIHDWGSALGFHWAKRNSERVKGIAFMEFIRPIPTWDEWPEFARETFQAFRTTDVGRKLIIDQNVFIEGTLPMGVVRPLTEVEMDHYREPFLNPVDREPLWRFPNELPIAGEPANIVALVEEYMDWLHQSPVPKLLFWGTPGVLIPPAEAARLAKSLPNCKAVDIGPGLNLLQEDNPDLIGSEIARWLSTLEISG

SEQ ID NO: 1780 - protein, 277 aa, Synthetic construct
MFHYVDVGPRDGTPVLFLHGNPTSSYVWRNIIPHVAPTHRCIAPDLIGMGKSDKPDLGYFFDDHVRFMDAFIEALGLEEVVLVIHDWGSALGFHWAKRNLERVKGIAFMEFIRPIPTWDEWPEFARETFQAFRTTDVGRKLIIDQNVFIEGTLPMGVVRPLTEVEMDHYREPFLNPVDREPLWRFPNELPIAGEPANIVALVEEYMDWLHQSPVPKLLFWGTPGVLIPPAEAARLAKSLPNCKAVDIGPGLNLLQEDNPDLIGSEIARWLSTLEISG

SEQ ID NO: 1781 - protein, 277 aa, Synthetic construct
MFHYVDVGPRDGTPVLFLHGNPTSSYVWRNIIPHVAPTHRCIAPDLIGMGKSDKPDLGYFFDDHVRFMDAFIEALGLEEVVLVIHDWGSALGFHWAKRNTERVKGIAFMEFIRPIPTWDEWPEFARETFQAFRTTDVGRKLIIDQNVFIEGTLPMGVVRPLTEVEMDHYREPFLNPVDREPLWRFPNELPIAGEPANIVALVEEYMDWLHQSPVPKLLFWGTPGVLIPPAEAARLAKSLPNCKAVDIGPGLNLLQEDNPDLIGSEIARWLSTLEISG

SEQ ID NO: 1782 - protein, 277 aa, Synthetic construct
MFHYVDVGPRDGTPVLFLHGNPTSSYVWRNIIPHVAPTHRCIAPDLIGMGKSDKPDLGYFFDDHVRFMDAFIEALGLEEVVLVIHDWGSALGFHWAKRNPDRVKGIAFMEFIRPIPTWDEWPEFARETFQAFRTTDVGRKLIIDQNVFIEGTLPMGVVRPLTEVEMDHYREPFLNPVDREPLWRFPNELPIAGEPANIVALVEEYMDWLHQSPVPKLLFWGTPGVLIPPAEAARLAKSLPNCKAVDIGPGLNLLQEDNPDLIGSEIARWLSTLEISG

SEQ ID NO: 1783 - protein, 277 aa, Synthetic construct
MFHYVDVGPRDGTPVLFLHGNPTSSYVWRNIIPHVAPTHRCIAPDLIGMGKSDKPDLGYFFDDHVRFMDAFIEALGLEEVVLVIHDWGSALGFHWAKRNPGRVKGIAFMEFIRPIPTWDEWPEFARETFQAFRTTDVGRKLIIDQNVFIEGTLPMGVVRPLTEVEMDHYREPFLNPVDREPLWRFPNELPIAGEPANIVALVEEYMDWLHQSPVPKLLFWGTPGVLIPPAEAARLAKSLPNCKAVDIGPGLNLLQEDNPDLIGSEIARWLSTLEISG

SEQ ID NO: 1784 - protein, 277 aa, Synthetic construct
MFHYVDVGPRDGTPVLFLHGNPTSSYVWRNIIPHVAPTHRCIAPDLIGMGKSDKPDLGYFFDDHVRFMDAFIEALGLEEVVLVIHDWGSALGFHWAKRNPARVKGIAFMEFIRPIPTWDEWPEFARETFQAFRTTDVGRKLIIDQNVFIEGTLPMGVVRPLTEVEMDHYREPFLNPVDREPLWRFPNELPIAGEPANIVALVEEYMDWLHQSPVPKLLFWGTPGVLIPPAEAARLAKSLPNCKAVDIGPGLNLLQEDNPDLIGSEIARWLSTLEISG

SEQ ID NO: 1785 - protein, 277 aa, Synthetic construct
MFHYVDVGPRDGTPVLFLHGNPTSSYVWRNIIPHVAPTHRCIAPDLIGMGKSDKPDLGYFFDDHVRFMDAFIEALGLEEVVLVIHDWGSALGFHWAKRNPQRVKGIAFMEFIRPIPTWDEWPEFARETFQAFRTTDVGRKLIIDQNVFIEGTLPMGVVRPLTEVEMDHYREPFLNPVDREPLWRFPNELPIAGEPANIVALVEEYMDWLHQSPVPKLLFWGTPGVLIPPAEAARLAKSLPNCKAVDIGPGLNLLQEDNPDLIGSEIARWLSTLEISG

SEQ ID NO: 1786 - protein, 277 aa, Synthetic construct
MFHYVDVGPRDGTPVLFLHGNPTSSYVWRNIIPHVAPTHRCIAPDLIGMGKSDKPDLGYFFDDHVRFMDAFIEALGLEEVVLVIHDWGSALGFHWAKRNPSRVKGIAFMEFIRPIPTWDEWPEFARETFQAFRTTDVGRKLIIDQNVFIEGTLPMGVVRPLTEVEMDHYREPFLNPVDREPLWRFPNELPIAGEPANIVALVEEYMDWLHQSPVPKLLFWGTPGVLIPPAEAARLAKSLPNCKAVDIGPGLNLLQEDNPDLIGSEIARWLSTLEISG

SEQ ID NO: 1787 - protein, 277 aa, Synthetic construct
MFHYVDVGPRDGTPVLFLHGNPTSSYVWRNIIPHVAPTHRCIAPDLIGMGKSDKPDLGYFFDDHVRFMDAFIEALGLEEVVLVIHDWGSALGFHWAKRNPNRVKGIAFMEFIRPIPTWDEWPEFARETFQAFRTTDVGRKLIIDQNVFIEGTLPMGVVRPLTEVEMDHYREPFLNPVDREPLWRFPNELPIAGEPANIVALVEEYMDWLHQSPVPKLLFWGTPGVLIPPAEAARLAKSLPNCKAVDIGPGLNLLQEDNPDLIGSEIARWLSTLEISG

SEQ ID NO: 1788 - protein, 277 aa, Synthetic construct
MFHYVDVGPRDGTPVLFLHGNPTSSYVWRNIIPHVAPTHRCIAPDLIGMGKSDKPDLGYFFDDHVRFMDAFIEALGLEEVVLVIHDWGSALGFHWAKRNPEKVKGIAFMEFIRPIPTWDEWPEFARETFQAFRTTDVGRKLIIDQNVFIEGTLPMGVVRPLTEVEMDHYREPFLNPVDREPLWRFPNELPIAGEPANIVALVEEYMDWLHQSPVPKLLFWGTPGVLIPPAEAARLAKSLPNCKAVDIGPGLNLLQEDNPDLIGSEIARWLSTLEISG

SEQ ID NO: 1789 - protein, 277 aa, Synthetic construct
MFHYVDVGPRDGTPVLFLHGNPTSSYVWRNIIPHVAPTHRCIAPDLIGMGKSDKPDLGYFFDDHVRFMDAFIEALGLEEVVLVIHDWGSALGFHWAKRNPEAVKGIAFMEFIRPIPTWDEWPEFARETFQAFRTTDVGRKLIIDQNVFIEGTLPMGVVRPLTEVEMDHYREPFLNPVDREPLWRFPNELPIAGEPANIVALVEEYMDWLHQSPVPKLLFWGTPGVLIPPAEAARLAKSLPNCKAVDIGPGLNLLQEDNPDLIGSEIARWLSTLEISG

SEQ ID NO: 1790 - protein, 277 aa, Synthetic construct
MFHYVDVGPRDGTPVLFLHGNPTSSYVWRNIIPHVAPTHRCIAPDLIGMGKSDKPDLGYFFDDHVRFMDAFIEALGLEEVVLVIHDWGSALGFHWAKRNPELVKGIAFMEFIRPIPTWDEWPEFARETFQAFRTTDVGRKLIIDQNVFIEGTLPMGVVRPLTEVEMDHYREPFLNPVDREPLWRFPNELPIAGEPANIVALVEEYMDWLHQSPVPKLLFWGTPGVLIPPAEAARLAKSLPNCKAVDIGPGLNLLQEDNPDLIGSEIARWLSTLEISG

SEQ ID NO: 1791 - protein, 277 aa, Synthetic construct
MFHYVDVGPRDGTPVLFLHGNPTSSYVWRNIIPHVAPTHRCIAPDLIGMGKSDKPDLGYFFDDHVRFMDAFIEALGLEEVVLVIHDWGSALGFHWAKRNPEQVKGIAFMEFIRPIPTWDEWPEFARETFQAFRTTDVGRKLIIDQNVFIEGTLPMGVVRPLTEVEMDHYREPFLNPVDREPLWRFPNELPIAGEPANIVALVEEYMDWLHQSPVPKLLFWGTPGVLIPPAEAARLAKSLPNCKAVDIGPGLNLLQEDNPDLIGSEIARWLSTLEISG

SEQ ID NO: 1792 - protein, 277 aa, Synthetic construct
MFHYVDVGPRDGTPVLFLHGNPTSSYVWRNIIPHVAPTHRCIAPDLIGMGKSDKPDLGYFFDDHVRFMDAFIEALGLEEVVLVIHDWGSALGFHWAKRNPENVKGIAFMEFIRPIPTWDEWPEFARETFQAFRTTDVGRKLIIDQNVFIEGTLPMGVVRPLTEVEMDHYREPFLNPVDREPLWRFPNELPIAGEPANIVALVEEYMDWLHQSPVPKLLFWGTPGVLIPPAEAARLAKSLPNCKAVDIGPGLNLLQEDNPDLIGSEIARWLSTLEISG

SEQ ID NO: 1793 - protein, 277 aa, Synthetic construct
MFHYVDVGPRDGTPVLFLHGNPTSSYVWRNIIPHVAPTHRCIAPDLIGMGKSDKPDLGYFFDDHVRFMDAFIEALGLEEVVLVIHDWGSALGFHWAKRNPESVKGIAFMEFIRPIPTWDEWPEFARETFQAFRTTDVGRKLIIDQNVFIEGTLPMGVVRPLTEVEMDHYREPFLNPVDREPLWRFPNELPIAGEPANIVALVEEYMDWLHQSPVPKLLFWGTPGVLIPPAEAARLAKSLPNCKAVDIGPGLNLLQEDNPDLIGSEIARWLSTLEISG

SEQ ID NO: 1794 - protein, 277 aa, Synthetic construct
MFHYVDVGPRDGTPVLFLHGNPTSSYVWRNIIPHVAPTHRCIAPDLIGMGKSDKPDLGYFFDDHVRFMDAFIEALGLEEVVLVIHDWGSALGFHWAKRNPERIKGIAFMEFIRPIPTWDEWPEFARETFQAFRTTDVGRKLIIDQNVFIEGTLPMGVVRPLTEVEMDHYREPFLNPVDREPLWRFPNELPIAGEPANIVALVEEYMDWLHQSPVPKLLFWGTPGVLIPPAEAARLAKSLPNCKAVDIGPGLNLLQEDNPDLIGSEIARWLSTLEISG

SEQ ID NO: 1795 - protein, 277 aa, Synthetic construct
MFHYVDVGPRDGTPVLFLHGNPTSSYVWRNIIPHVAPTHRCIAPDLIGMGKSDKPDLGYFFDDHVRFMDAFIEALGLEEVVLVIHDWGSALGFHWAKRNPERLKGIAFMEFIRPIPTWDEWPEFARETFQAFRTTDVGRKLIIDQNVFIEGTLPMGVVRPLTEVEMDHYREPFLNPVDREPLWRFPNELPIAGEPANIVALVEEYMDWLHQSPVPKLLFWGTPGVLIPPAEAARLAKSLPNCKAVDIGPGLNLLQEDNPDLIGSEIARWLSTLEISG

SEQ ID NO: 1796 - protein, 277 aa, Synthetic construct
MFHYVDVGPRDGTPVLFLHGNPTSSYVWRNIIPHVAPTHRCIAPDLIGMGKSDKPDLGYFFDDHVRFMDAFIEALGLEEVVLVIHDWGSALGFHWAKRNPERTKGIAFMEFIRPIPTWDEWPEFARETFQAFRTTDVGRKLIIDQNVFIEGTLPMGVVRPLTEVEMDHYREPFLNPVDREPLWRFPNELPIAGEPANIVALVEEYMDWLHQSPVPKLLFWGTPGVLIPPAEAARLAKSLPNCKAVDIGPGLNLLQEDNPDLIGSEIARWLSTLEISG

SEQ ID NO: 1797 - protein, 277 aa, Synthetic construct
MFHYVDVGPRDGTPVLFLHGNPTSSYVWRNIIPHVAPTHRCIAPDLIGMGKSDKPDLGYFFDDHVRFMDAFIEALGLEEVVLVIHDWGSALGFHWAKRNPERMKGIAFMEFIRPIPTWDEWPEFARETFQAFRTTDVGRKLIIDQNVFIEGTLPMGVVRPLTEVEMDHYREPFLNPVDREPLWRFPNELPIAGEPANIVALVEEYMDWLHQSPVPKLLFWGTPGVLIPPAEAARLAKSLPNCKAVDIGPGLNLLQEDNPDLIGSEIARWLSTLEISG

SEQ ID NO: 1798 - protein, 277 aa, Synthetic construct
MFHYVDVGPRDGTPVLFLHGNPTSSYVWRNIIPHVAPTHRCIAPDLIGMGKSDKPDLGYFFDDHVRFMDAFIEALGLEEVVLVIHDWGSALGFHWAKRNPERAKGIAFMEFIRPIPTWDEWPEFARETFQAFRTTDVGRKLIIDQNVFIEGTLPMGVVRPLTEVEMDHYREPFLNPVDREPLWRFPNELPIAGEPANIVALVEEYMDWLHQSPVPKLLFWGTPGVLIPPAEAARLAKSLPNCKAVDIGPGLNLLQEDNPDLIGSEIARWLSTLEISG

SEQ ID NO: 1799 - protein, 277 aa, Synthetic construct
MFHYVDVGPRDGTPVLFLHGNPTSSYVWRNIIPHVAPTHRCIAPDLIGMGKSDKPDLGYFFDDHVRFMDAFIEALGLEEVVLVIHDWGSALGFHWAKRNPERFKGIAFMEFIRPIPTWDEWPEFARETFQAFRTTDVGRKLIIDQNVFIEGTLPMGVVRPLTEVEMDHYREPFLNPVDREPLWRFPNELPIAGEPANIVALVEEYMDWLHQSPVPKLLFWGTPGVLIPPAEAARLAKSLPNCKAVDIGPGLNLLQEDNPDLIGSEIARWLSTLEISG

SEQ ID NO: 1800 - protein, 277 aa, Synthetic construct
MFHYVDVGPRDGTPVLFLHGNPTSSYVWRNIIPHVAPTHRCIAPDLIGMGKSDKPDLGYFFDDHVRFMDAFIEALGLEEVVLVIHDWGSALGFHWAKRNPERVRGIAFMEFIRPIPTWDEWPEFARETFQAFRTTDVGRKLIIDQNVFIEGTLPMGVVRPLTEVEMDHYREPFLNPVDREPLWRFPNELPIAGEPANIVALVEEYMDWLHQSPVPKLLFWGTPGVLIPPAEAARLAKSLPNCKAVDIGPGLNLLQEDNPDLIGSEIARWLSTLEISG

SEQ ID NO: 1801 - protein, 277 aa, Synthetic construct
MFHYVDVGPRDGTPVLFLHGNPTSSYVWRNIIPHVAPTHRCIAPDLIGMGKSDKPDLGYFFDDHVRFMDAFIEALGLEEVVLVIHDWGSALGFHWAKRNPERVAGIAFMEFIRPIPTWDEWPEFARETFQAFRTTDVGRKLIIDQNVFIEGTLPMGVVRPLTEVEMDHYREPFLNPVDREPLWRFPNELPIAGEPANIVALVEEYMDWLHQSPVPKLLFWGTPGVLIPPAEAARLAKSLPNCKAVDIGPGLNLLQEDNPDLIGSEIARWLSTLEISG

SEQ ID NO: 1802 - protein, 277 aa, Synthetic construct
MFHYVDVGPRDGTPVLFLHGNPTSSYVWRNIIPHVAPTHRCIAPDLIGMGKSDKPDLGYFFDDHVRFMDAFIEALGLEEVVLVIHDWGSALGFHWAKRNPERVSGIAFMEFIRPIPTWDEWPEFARETFQAFRTTDVGRKLIIDQNVFIEGTLPMGVVRPLTEVEMDHYREPFLNPVDREPLWRFPNELPIAGEPANIVALVEEYMDWLHQSPVPKLLFWGTPGVLIPPAEAARLAKSLPNCKAVDIGPGLNLLQEDNPDLIGSEIARWLSTLEISG

SEQ ID NO: 1803 - protein, 277 aa, Synthetic construct
MFHYVDVGPRDGTPVLFLHGNPTSSYVWRNIIPHVAPTHRCIAPDLIGMGKSDKPDLGYFFDDHVRFMDAFIEALGLEEVVLVIHDWGSALGFHWAKRNPERVLGIAFMEFIRPIPTWDEWPEFARETFQAFRTTDVGRKLIIDQNVFIEGTLPMGVVRPLTEVEMDHYREPFLNPVDREPLWRFPNELPIAGEPANIVALVEEYMDWLHQSPVPKLLFWGTPGVLIPPAEAARLAKSLPNCKAVDIGPGLNLLQEDNPDLIGSEIARWLSTLEISG

SEQ ID NO: 1804 - protein, 277 aa, Synthetic construct
MFHYVDVGPRDGTPVLFLHGNPTSSYVWRNIIPHVAPTHRCIAPDLIGMGKSDKPDLGYFFDDHVRFMDAFIEALGLEEVVLVIHDWGSALGFHWAKRNPERVTGIAFMEFIRPIPTWDEWPEFARETFQAFRTTDVGRKLIIDQNVFIEGTLPMGVVRPLTEVEMDHYREPFLNPVDREPLWRFPNELPIAGEPANIVALVEEYMDWLHQSPVPKLLFWGTPGVLIPPAEAARLAKSLPNCKAVDIGPGLNLLQEDNPDLIGSEIARWLSTLEISG

SEQ ID NO: 1805 - protein, 277 aa, Synthetic construct
MFHYVDVGPRDGTPVLFLHGNPTSSYVWRNIIPHVAPTHRCIAPDLIGMGKSDKPDLGYFFDDHVRFMDAFIEALGLEEVVLVIHDWGSALGFHWAKRNPERVVGIAFMEFIRPIPTWDEWPEFARETFQAFRTTDVGRKLIIDQNVFIEGTLPMGVVRPLTEVEMDHYREPFLNPVDREPLWRFPNELPIAGEPANIVALVEEYMDWLHQSPVPKLLFWGTPGVLIPPAEAARLAKSLPNCKAVDIGPGLNLLQEDNPDLIGSEIARWLSTLEISG

SEQ ID NO: 1806 - protein, 277 aa, Synthetic construct
MFHYVDVGPRDGTPVLFLHGNPTSSYVWRNIIPHVAPTHRCIAPDLIGMGKSDKPDLGYFFDDHVRFMDAFIEALGLEEVVLVIHDWGSALGFHWAKRNPERVKAIAFMEFIRPIPTWDEWPEFARETFQAFRTTDVGRKLIIDQNVFIEGTLPMGVVRPLTEVEMDHYREPFLNPVDREPLWRFPNELPIAGEPANIVALVEEYMDWLHQSPVPKLLFWGTPGVLIPPAEAARLAKSLPNCKAVDIGPGLNLLQEDNPDLIGSEIARWLSTLEISG

SEQ ID NO: 1807 - protein, 277 aa, Synthetic construct
MFHYVDVGPRDGTPVLFLHGNPTSSYVWRNIIPHVAPTHRCIAPDLIGMGKSDKPDLGYFFDDHVRFMDAFIEALGLEEVVLVIHDWGSALGFHWAKRNPERVKSIAFMEFIRPIPTWDEWPEFARETFQAFRTTDVGRKLIIDQNVFIEGTLPMGVVRPLTEVEMDHYREPFLNPVDREPLWRFPNELPIAGEPANIVALVEEYMDWLHQSPVPKLLFWGTPGVLIPPAEAARLAKSLPNCKAVDIGPGLNLLQEDNPDLIGSEIARWLSTLEISG

SEQ ID NO: 1808 - protein, 277 aa, Synthetic construct
MFHYVDVGPRDGTPVLFLHGNPTSSYVWRNIIPHVAPTHRCIAPDLIGMGKSDKPDLGYFFDDHVRFMDAFIEALGLEEVVLVIHDWGSALGFHWAKRNPERVKRIAFMEFIRPIPTWDEWPEFARETFQAFRTTDVGRKLIIDQNVFIEGTLPMGVVRPLTEVEMDHYREPFLNPVDREPLWRFPNELPIAGEPANIVALVEEYMDWLHQSPVPKLLFWGTPGVLIPPAEAARLAKSLPNCKAVDIGPGLNLLQEDNPDLIGSEIARWLSTLEISG

SEQ ID NO: 1809 - protein, 277 aa, Synthetic construct
MFHYVDVGPRDGTPVLFLHGNPTSSYVWRNIIPHVAPTHRCIAPDLIGMGKSDKPDLGYFFDDHVRFMDAFIEALGLEEVVLVIHDWGSALGFHWAKRNPERVKCIAFMEFIRPIPTWDEWPEFARETFQAFRTTDVGRKLIIDQNVFIEGTLPMGVVRPLTEVEMDHYREPFLNPVDREPLWRFPNELPIAGEPANIVALVEEYMDWLHQSPVPKLLFWGTPGVLIPPAEAARLAKSLPNCKAVDIGPGLNLLQEDNPDLIGSEIARWLSTLEISG

SEQ ID NO: 1810 - protein, 277 aa, Synthetic construct
MFHYVDVGPRDGTPVLFLHGNPTSSYVWRNIIPHVAPTHRCIAPDLIGMGKSDKPDLGYFFDDHVRFMDAFIEALGLEEVVLVIHDWGSALGFHWAKRNPERVKTIAFMEFIRPIPTWDEWPEFARETFQAFRTTDVGRKLIIDQNVFIEGTLPMGVVRPLTEVEMDHYREPFLNPVDREPLWRFPNELPIAGEPANIVALVEEYMDWLHQSPVPKLLFWGTPGVLIPPAEAARLAKSLPNCKAVDIGPGLNLLQEDNPDLIGSEIARWLSTLEISG

SEQ ID NO: 1811 - protein, 277 aa, Synthetic construct
MFHYVDVGPRDGTPVLFLHGNPTSSYVWRNIIPHVAPTHRCIAPDLIGMGKSDKPDLGYFFDDHVRFMDAFIEALGLEEVVLVIHDWGSALGFHWAKRNPERVKVIAFMEFIRPIPTWDEWPEFARETFQAFRTTDVGRKLIIDQNVFIEGTLPMGVVRPLTEVEMDHYREPFLNPVDREPLWRFPNELPIAGEPANIVALVEEYMDWLHQSPVPKLLFWGTPGVLIPPAEAARLAKSLPNCKAVDIGPGLNLLQEDNPDLIGSEIARWLSTLEISG

SEQ ID NO: 1812 - protein, 277 aa, Synthetic construct
MFHYVDVGPRDGTPVLFLHGNPTSSYVWRNIIPHVAPTHRCIAPDLIGMGKSDKPDLGYFFDDHVRFMDAFIEALGLEEVVLVIHDWGSALGFHWAKRNPERVKGLAFMEFIRPIPTWDEWPEFARETFQAFRTTDVGRKLIIDQNVFIEGTLPMGVVRPLTEVEMDHYREPFLNPVDREPLWRFPNELPIAGEPANIVALVEEYMDWLHQSPVPKLLFWGTPGVLIPPAEAARLAKSLPNCKAVDIGPGLNLLQEDNPDLIGSEIARWLSTLEISG

SEQ ID NO: 1813 - protein, 277 aa, Synthetic construct
MFHYVDVGPRDGTPVLFLHGNPTSSYVWRNIIPHVAPTHRCIAPDLIGMGKSDKPDLGYFFDDHVRFMDAFIEALGLEEVVLVIHDWGSALGFHWAKRNPERVKGVAFMEFIRPIPTWDEWPEFARETFQAFRTTDVGRKLIIDQNVFIEGTLPMGVVRPLTEVEMDHYREPFLNPVDREPLWRFPNELPIAGEPANIVALVEEYMDWLHQSPVPKLLFWGTPGVLIPPAEAARLAKSLPNCKAVDIGPGLNLLQEDNPDLIGSEIARWLSTLEISG

SEQ ID NO: 1814 - protein, 277 aa, Synthetic construct
MFHYVDVGPRDGTPVLFLHGNPTSSYVWRNIIPHVAPTHRCIAPDLIGMGKSDKPDLGYFFDDHVRFMDAFIEALGLEEVVLVIHDWGSALGFHWAKRNPERVKGMAFMEFIRPIPTWDEWPEFARETFQAFRTTDVGRKLIIDQNVFIEGTLPMGVVRPLTEVEMDHYREPFLNPVDREPLWRFPNELPIAGEPANIVALVEEYMDWLHQSPVPKLLFWGTPGVLIPPAEAARLAKSLPNCKAVDIGPGLNLLQEDNPDLIGSEIARWLSTLEISG

SEQ ID NO: 1815 - protein, 277 aa, Synthetic construct
MFHYVDVGPRDGTPVLFLHGNPTSSYVWRNIIPHVAPTHRCIAPDLIGMGKSDKPDLGYFFDDHVRFMDAFIEALGLEEVVLVIHDWGSALGFHWAKRNPERVKGFAFMEFIRPIPTWDEWPEFARETFQAFRTTDVGRKLIIDQNVFIEGTLPMGVVRPLTEVEMDHYREPFLNPVDREPLWRFPNELPIAGEPANIVALVEEYMDWLHQSPVPKLLFWGTPGVLIPPAEAARLAKSLPNCKAVDIGPGLNLLQEDNPDLIGSEIARWLSTLEISG

SEQ ID NO: 1816 - protein, 277 aa, Synthetic construct
MFHYVDVGPRDGTPVLFLHGNPTSSYVWRNIIPHVAPTHRCIAPDLIGMGKSDKPDLGYFFDDHVRFMDAFIEALGLEEVVLVIHDWGSALGFHWAKRNPERVKGAAFMEFIRPIPTWDEWPEFARETFQAFRTTDVGRKLIIDQNVFIEGTLPMGVVRPLTEVEMDHYREPFLNPVDREPLWRFPNELPIAGEPANIVALVEEYMDWLHQSPVPKLLFWGTPGVLIPPAEAARLAKSLPNCKAVDIGPGLNLLQEDNPDLIGSEIARWLSTLEISG

SEQ ID NO: 1817 - protein, 277 aa, Synthetic construct
MFHYVDVGPRDGTPVLFLHGNPTSSYVWRNIIPHVAPTHRCIAPDLIGMGKSDKPDLGYFFDDHVRFMDAFIEALGLEEVVLVIHDWGSALGFHWAKRNPERVKGYAFMEFIRPIPTWDEWPEFARETFQAFRTTDVGRKLIIDQNVFIEGTLPMGVVRPLTEVEMDHYREPFLNPVDREPLWRFPNELPIAGEPANIVALVEEYMDWLHQSPVPKLLFWGTPGVLIPPAEAARLAKSLPNCKAVDIGPGLNLLQEDNPDLIGSEIARWLSTLEISG

SEQ ID NO: 1818 - protein, 277 aa, Synthetic construct
MFHYVDVGPRDGTPVLFLHGNPTSSYVWRNIIPHVAPTHRCIAPDLIGMGKSDKPDLGYFFDDHVRFMDAFIEALGLEEVVLVIHDWGSALGFHWAKRNPERVKGIVFMEFIRPIPTWDEWPEFARETFQAFRTTDVGRKLIIDQNVFIEGTLPMGVVRPLTEVEMDHYREPFLNPVDREPLWRFPNELPIAGEPANIVALVEEYMDWLHQSPVPKLLFWGTPGVLIPPAEAARLAKSLPNCKAVDIGPGLNLLQEDNPDLIGSEIARWLSTLEISG

SEQ ID NO: 1819 - protein, 277 aa, Synthetic construct
MFHYVDVGPRDGTPVLFLHGNPTSSYVWRNIIPHVAPTHRCIAPDLIGMGKSDKPDLGYFFDDHVRFMDAFIEALGLEEVVLVIHDWGSALGFHWAKRNPERVKGICFMEFIRPIPTWDEWPEFARETFQAFRTTDVGRKLIIDQNVFIEGTLPMGVVRPLTEVEMDHYREPFLNPVDREPLWRFPNELPIAGEPANIVALVEEYMDWLHQSPVPKLLFWGTPGVLIPPAEAARLAKSLPNCKAVDIGPGLNLLQEDNPDLIGSEIARWLSTLEISG

SEQ ID NO: 1820 - protein, 277 aa, Synthetic construct
MFHYVDVGPRDGTPVLFLHGNPTSSYVWRNIIPHVAPTHRCIAPDLIGMGKSDKPDLGYFFDDHVRFMDAFIEALGLEEVVLVIHDWGSALGFHWAKRNPERVKGIGFMEFIRPIPTWDEWPEFARETFQAFRTTDVGRKLIIDQNVFIEGTLPMGVVRPLTEVEMDHYREPFLNPVDREPLWRFPNELPIAGEPANIVALVEEYMDWLHQSPVPKLLFWGTPGVLIPPAEAARLAKSLPNCKAVDIGPGLNLLQEDNPDLIGSEIARWLSTLEISG

SEQ ID NO: 1821 - protein, 277 aa, Synthetic construct
MFHYVDVGPRDGTPVLFLHGNPTSSYVWRNIIPHVAPTHRCIAPDLIGMGKSDKPDLGYFFDDHVRFMDAFIEALGLEEVVLVIHDWGSALGFHWAKRNPERVKGIIFMEFIRPIPTWDEWPEFARETFQAFRTTDVGRKLIIDQNVFIEGTLPMGVVRPLTEVEMDHYREPFLNPVDREPLWRFPNELPIAGEPANIVALVEEYMDWLHQSPVPKLLFWGTPGVLIPPAEAARLAKSLPNCKAVDIGPGLNLLQEDNPDLIGSEIARWLSTLEISG

SEQ ID NO: 1822 - protein, 277 aa, Synthetic construct
MFHYVDVGPRDGTPVLFLHGNPTSSYVWRNIIPHVAPTHRCIAPDLIGMGKSDKPDLGYFFDDHVRFMDAFIEALGLEEVVLVIHDWGSALGFHWAKRNPERVKGISFMEFIRPIPTWDEWPEFARETFQAFRTTDVGRKLIIDQNVFIEGTLPMGVVRPLTEVEMDHYREPFLNPVDREPLWRFPNELPIAGEPANIVALVEEYMDWLHQSPVPKLLFWGTPGVLIPPAEAARLAKSLPNCKAVDIGPGLNLLQEDNPDLIGSEIARWLSTLEISG

SEQ ID NO: 1823 - protein, 277 aa, Synthetic construct
MFHYVDVGPRDGTPVLFLHGNPTSSYVWRNIIPHVAPTHRCIAPDLIGMGKSDKPDLGYFFDDHVRFMDAFIEALGLEEVVLVIHDWGSALGFHWAKRNPERVKGITFMEFIRPIPTWDEWPEFARETFQAFRTTDVGRKLIIDQNVFIEGTLPMGVVRPLTEVEMDHYREPFLNPVDREPLWRFPNELPIAGEPANIVALVEEYMDWLHQSPVPKLLFWGTPGVLIPPAEAARLAKSLPNCKAVDIGPGLNLLQEDNPDLIGSEIARWLSTLEISG

SEQ ID NO: 1824 - protein, 277 aa, Synthetic construct
MFHYVDVGPRDGTPVLFLHGNPTSSYVWRNIIPHVAPTHRCIAPDLIGMGKSDKPDLGYFFDDHVRFMDAFIEALGLEEVVLVIHDWGSALGFHWAKRNPERVKGIAYMEFIRPIPTWDEWPEFARETFQAFRTTDVGRKLIIDQNVFIEGTLPMGVVRPLTEVEMDHYREPFLNPVDREPLWRFPNELPIAGEPANIVALVEEYMDWLHQSPVPKLLFWGTPGVLIPPAEAARLAKSLPNCKAVDIGPGLNLLQEDNPDLIGSEIARWLSTLEISG

SEQ ID NO: 1825 - protein, 277 aa, Synthetic construct
MFHYVDVGPRDGTPVLFLHGNPTSSYVWRNIIPHVAPTHRCIAPDLIGMGKSDKPDLGYFFDDHVRFMDAFIEALGLEEVVLVIHDWGSALGFHWAKRNPERVKGIALMEFIRPIPTWDEWPEFARETFQAFRTTDVGRKLIIDQNVFIEGTLPMGVVRPLTEVEMDHYREPFLNPVDREPLWRFPNELPIAGEPANIVALVEEYMDWLHQSPVPKLLFWGTPGVLIPPAEAARLAKSLPNCKAVDIGPGLNLLQEDNPDLIGSEIARWLSTLEISG

SEQ ID NO: 1826 - protein, 277 aa, Synthetic construct
MFHYVDVGPRDGTPVLFLHGNPTSSYVWRNIIPHVAPTHRCIAPDLIGMGKSDKPDLGYFFDDHVRFMDAFIEALGLEEVVLVIHDWGSALGFHWAKRNPERVKGIAIMEFIRPIPTWDEWPEFARETFQAFRTTDVGRKLIIDQNVFIEGTLPMGVVRPLTEVEMDHYREPFLNPVDREPLWRFPNELPIAGEPANIVALVEEYMDWLHQSPVPKLLFWGTPGVLIPPAEAARLAKSLPNCKAVDIGPGLNLLQEDNPDLIGSEIARWLSTLEISG

SEQ ID NO: 1827 - protein, 277 aa, Synthetic construct
MFHYVDVGPRDGTPVLFLHGNPTSSYVWRNIIPHVAPTHRCIAPDLIGMGKSDKPDLGYFFDDHVRFMDAFIEALGLEEVVLVIHDWGSALGFHWAKRNPERVKGIAMMEFIRPIPTWDEWPEFARETFQAFRTTDVGRKLIIDQNVFIEGTLPMGVVRPLTEVEMDHYREPFLNPVDREPLWRFPNELPIAGEPANIVALVEEYMDWLHQSPVPKLLFWGTPGVLIPPAEAARLAKSLPNCKAVDIGPGLNLLQEDNPDLIGSEIARWLSTLEISG

SEQ ID NO: 1828 - protein, 277 aa, Synthetic construct
MFHYVDVGPRDGTPVLFLHGNPTSSYVWRNIIPHVAPTHRCIAPDLIGMGKSDKPDLGYFFDDHVRFMDAFIEALGLEEVVLVIHDWGSALGFHWAKRNPERVKGIAVMEFIRPIPTWDEWPEFARETFQAFRTTDVGRKLIIDQNVFIEGTLPMGVVRPLTEVEMDHYREPFLNPVDREPLWRFPNELPIAGEPANIVALVEEYMDWLHQSPVPKLLFWGTPGVLIPPAEAARLAKSLPNCKAVDIGPGLNLLQEDNPDLIGSEIARWLSTLEISG

SEQ ID NO: 1829 - protein, 277 aa, Synthetic construct
MFHYVDVGPRDGTPVLFLHGNPTSSYVWRNIIPHVAPTHRCIAPDLIGMGKSDKPDLGYFFDDHVRFMDAFIEALGLEEVVLVIHDWGSALGFHWAKRNPERVKGIAHMEFIRPIPTWDEWPEFARETFQAFRTTDVGRKLIIDQNVFIEGTLPMGVVRPLTEVEMDHYREPFLNPVDREPLWRFPNELPIAGEPANIVALVEEYMDWLHQSPVPKLLFWGTPGVLIPPAEAARLAKSLPNCKAVDIGPGLNLLQEDNPDLIGSEIARWLSTLEISG

SEQ ID NO: 1830 - protein, 277 aa, Synthetic construct
MFHYVDVGPRDGTPVLFLHGNPTSSYVWRNIIPHVAPTHRCIAPDLIGMGKSDKPDLGYFFDDHVRFMDAFIEALGLEEVVLVIHDWGSALGFHWAKRNPERVKGIAFLEFIRPIPTWDEWPEFARETFQAFRTTDVGRKLIIDQNVFIEGTLPMGVVRPLTEVEMDHYREPFLNPVDREPLWRFPNELPIAGEPANIVALVEEYMDWLHQSPVPKLLFWGTPGVLIPPAEAARLAKSLPNCKAVDIGPGLNLLQEDNPDLIGSEIARWLSTLEISG

SEQ ID NO: 1831 - protein, 277 aa, Synthetic construct
MFHYVDVGPRDGTPVLFLHGNPTSSYVWRNIIPHVAPTHRCIAPDLIGMGKSDKPDLGYFFDDHVRFMDAFIEALGLEEVVLVIHDWGSALGFHWAKRNPERVKGIAFFEFIRPIPTWDEWPEFARETFQAFRTTDVGRKLIIDQNVFIEGTLPMGVVRPLTEVEMDHYREPFLNPVDREPLWRFPNELPIAGEPANIVALVEEYMDWLHQSPVPKLLFWGTPGVLIPPAEAARLAKSLPNCKAVDIGPGLNLLQEDNPDLIGSEIARWLSTLEISG

SEQ ID NO: 1832 - protein, 277 aa, Synthetic construct
MFHYVDVGPRDGTPVLFLHGNPTSSYVWRNIIPHVAPTHRCIAPDLIGMGKSDKPDLGYFFDDHVRFMDAFIEALGLEEVVLVIHDWGSALGFHWAKRNPERVKGIAFTEFIRPIPTWDEWPEFARETFQAFRTTDVGRKLIIDQNVFIEGTLPMGVVRPLTEVEMDHYREPFLNPVDREPLWRFPNELPIAGEPANIVALVEEYMDWLHQSPVPKLLFWGTPGVLIPPAEAARLAKSLPNCKAVDIGPGLNLLQEDNPDLIGSEIARWLSTLEISG

SEQ ID NO: 1833 - protein, 277 aa, Synthetic construct
MFHYVDVGPRDGTPVLFLHGNPTSSYVWRNIIPHVAPTHRCIAPDLIGMGKSDKPDLGYFFDDHVRFMDAFIEALGLEEVVLVIHDWGSALGFHWAKRNPERVKGIAFAEFIRPIPTWDEWPEFARETFQAFRTTDVGRKLIIDQNVFIEGTLPMGVVRPLTEVEMDHYREPFLNPVDREPLWRFPNELPIAGEPANIVALVEEYMDWLHQSPVPKLLFWGTPGVLIPPAEAARLAKSLPNCKAVDIGPGLNLLQEDNPDLIGSEIARWLSTLEISG

SEQ ID NO: 1834 - protein, 277 aa, Synthetic construct
MFHYVDVGPRDGTPVLFLHGNPTSSYVWRNIIPHVAPTHRCIAPDLIGMGKSDKPDLGYFFDDHVRFMDAFIEALGLEEVVLVIHDWGSALGFHWAKRNPERVKGIAFIEFIRPIPTWDEWPEFARETFQAFRTTDVGRKLIIDQNVFIEGTLPMGVVRPLTEVEMDHYREPFLNPVDREPLWRFPNELPIAGEPANIVALVEEYMDWLHQSPVPKLLFWGTPGVLIPPAEAARLAKSLPNCKAVDIGPGLNLLQEDNPDLIGSEIARWLSTLEISG

SEQ ID NO: 1835 - protein, 277 aa, Synthetic construct
MFHYVDVGPRDGTPVLFLHGNPTSSYVWRNIIPHVAPTHRCIAPDLIGMGKSDKPDLGYFFDDHVRFMDAFIEALGLEEVVLVIHDWGSALGFHWAKRNPERVKGIAFSEFIRPIPTWDEWPEFARETFQAFRTTDVGRKLIIDQNVFIEGTLPMGVVRPLTEVEMDHYREPFLNPVDREPLWRFPNELPIAGEPANIVALVEEYMDWLHQSPVPKLLFWGTPGVLIPPAEAARLAKSLPNCKAVDIGPGLNLLQEDNPDLIGSEIARWLSTLEISG

SEQ ID NO: 1836 - protein, 277 aa, Synthetic construct
MFHYVDVGPRDGTPVLFLHGNPTSSYVWRNIIPHVAPTHRCIAPDLIGMGKSDKPDLGYFFDDHVRFMDAFIEALGLEEVVLVIHDWGSALGFHWAKRNPERVKGIAFMDFIRPIPTWDEWPEFARETFQAFRTTDVGRKLIIDQNVFIEGTLPMGVVRPLTEVEMDHYREPFLNPVDREPLWRFPNELPIAGEPANIVALVEEYMDWLHQSPVPKLLFWGTPGVLIPPAEAARLAKSLPNCKAVDIGPGLNLLQEDNPDLIGSEIARWLSTLEISG

SEQ ID NO: 1837 - protein, 277 aa, Synthetic construct
MFHYVDVGPRDGTPVLFLHGNPTSSYVWRNIIPHVAPTHRCIAPDLIGMGKSDKPDLGYFFDDHVRFMDAFIEALGLEEVVLVIHDWGSALGFHWAKRNPERVKGIAFMQFIRPIPTWDEWPEFARETFQAFRTTDVGRKLIIDQNVFIEGTLPMGVVRPLTEVEMDHYREPFLNPVDREPLWRFPNELPIAGEPANIVALVEEYMDWLHQSPVPKLLFWGTPGVLIPPAEAARLAKSLPNCKAVDIGPGLNLLQEDNPDLIGSEIARWLSTLEISG

SEQ ID NO: 1838 - protein, 277 aa, Synthetic construct
MFHYVDVGPRDGTPVLFLHGNPTSSYVWRNIIPHVAPTHRCIAPDLIGMGKSDKPDLGYFFDDHVRFMDAFIEALGLEEVVLVIHDWGSALGFHWAKRNPERVKGIAFMNFIRPIPTWDEWPEFARETFQAFRTTDVGRKLIIDQNVFIEGTLPMGVVRPLTEVEMDHYREPFLNPVDREPLWRFPNELPIAGEPANIVALVEEYMDWLHQSPVPKLLFWGTPGVLIPPAEAARLAKSLPNCKAVDIGPGLNLLQEDNPDLIGSEIARWLSTLEISG

SEQ ID NO: 1839 - protein, 277 aa, Synthetic construct
MFHYVDVGPRDGTPVLFLHGNPTSSYVWRNIIPHVAPTHRCIAPDLIGMGKSDKPDLGYFFDDHVRFMDAFIEALGLEEVVLVIHDWGSALGFHWAKRNPERVKGIAFMGFIRPIPTWDEWPEFARETFQAFRTTDVGRKLIIDQNVFIEGTLPMGVVRPLTEVEMDHYREPFLNPVDREPLWRFPNELPIAGEPANIVALVEEYMDWLHQSPVPKLLFWGTPGVLIPPAEAARLAKSLPNCKAVDIGPGLNLLQEDNPDLIGSEIARWLSTLEISG

SEQ ID NO: 1840 - protein, 277 aa, Synthetic construct
MFHYVDVGPRDGTPVLFLHGNPTSSYVWRNIIPHVAPTHRCIAPDLIGMGKSDKPDLGYFFDDHVRFMDAFIEALGLEEVVLVIHDWGSALGFHWAKRNPERVKGIAFMSFIRPIPTWDEWPEFARETFQAFRTTDVGRKLIIDQNVFIEGTLPMGVVRPLTEVEMDHYREPFLNPVDREPLWRFPNELPIAGEPANIVALVEEYMDWLHQSPVPKLLFWGTPGVLIPPAEAARLAKSLPNCKAVDIGPGLNLLQEDNPDLIGSEIARWLSTLEISG

SEQ ID NO: 1841 - protein, 277 aa, Synthetic construct
MFHYVDVGPRDGTPVLFLHGNPTSSYVWRNIIPHVAPTHRCIAPDLIGMGKSDKPDLGYFFDDHVRFMDAFIEALGLEEVVLVIHDWGSALGFHWAKRNPERVKGIAFMAFIRPIPTWDEWPEFARETFQAFRTTDVGRKLIIDQNVFIEGTLPMGVVRPLTEVEMDHYREPFLNPVDREPLWRFPNELPIAGEPANIVALVEEYMDWLHQSPVPKLLFWGTPGVLIPPAEAARLAKSLPNCKAVDIGPGLNLLQEDNPDLIGSEIARWLSTLEISG

SEQ ID NO: 1842 - protein, 277 aa, Synthetic construct
MFHYVDVGPRDGTPVLFLHGNPTSSYVWRNIIPHVAPTHRCIAPDLIGMGKSDKPDLGYFFDDHVRFMDAFIEALGLEEVVLVIHDWGSALGFHWAKRNPERVKGIAFMEAIRPIPTWDEWPEFARETFQAFRTTDVGRKLIIDQNVFIEGTLPMGVVRPLTEVEMDHYREPFLNPVDREPLWRFPNELPIAGEPANIVALVEEYMDWLHQSPVPKLLFWGTPGVLIPPAEAARLAKSLPNCKAVDIGPGLNLLQEDNPDLIGSEIARWLSTLEISG

SEQ ID NO: 1843 - protein, 277 aa, Synthetic construct
MFHYVDVGPRDGTPVLFLHGNPTSSYVWRNIIPHVAPTHRCIAPDLIGMGKSDKPDLGYFFDDHVRFMDAFIEALGLEEVVLVIHDWGSALGFHWAKRNPERVKGIAFMETIRPIPTWDEWPEFARETFQAFRTTDVGRKLIIDQNVFIEGTLPMGVVRPLTEVEMDHYREPFLNPVDREPLWRFPNELPIAGEPANIVALVEEYMDWLHQSPVPKLLFWGTPGVLIPPAEAARLAKSLPNCKAVDIGPGLNLLQEDNPDLIGSEIARWLSTLEISG

SEQ ID NO: 1844 - protein, 277 aa, Synthetic construct
MFHYVDVGPRDGTPVLFLHGNPTSSYVWRNIIPHVAPTHRCIAPDLIGMGKSDKPDLGYFFDDHVRFMDAFIEALGLEEVVLVIHDWGSALGFHWAKRNPERVKGIAFMEVIRPIPTWDEWPEFARETFQAFRTTDVGRKLIIDQNVFIEGTLPMGVVRPLTEVEMDHYREPFLNPVDREPLWRFPNELPIAGEPANIVALVEEYMDWLHQSPVPKLLFWGTPGVLIPPAEAARLAKSLPNCKAVDIGPGLNLLQEDNPDLIGSEIARWLSTLEISG

SEQ ID NO: 1845 - protein, 277 aa, Synthetic construct
MFHYVDVGPRDGTPVLFLHGNPTSSYVWRNIIPHVAPTHRCIAPDLIGMGKSDKPDLGYFFDDHVRFMDAFIEALGLEEVVLVIHDWGSALGFHWAKRNPERVKGIAFMEGIRPIPTWDEWPEFARETFQAFRTTDVGRKLIIDQNVFIEGTLPMGVVRPLTEVEMDHYREPFLNPVDREPLWRFPNELPIAGEPANIVALVEEYMDWLHQSPVPKLLFWGTPGVLIPPAEAARLAKSLPNCKAVDIGPGLNLLQEDNPDLIGSEIARWLSTLEISG

SEQ ID NO: 1846 - protein, 277 aa, Synthetic construct
MFHYVDVGPRDGTPVLFLHGNPTSSYVWRNIIPHVAPTHRCIAPDLIGMGKSDKPDLGYFFDDHVRFMDAFIEALGLEEVVLVIHDWGSALGFHWAKRNPERVKGIAFMEMIRPIPTWDEWPEFARETFQAFRTTDVGRKLIIDQNVFIEGTLPMGVVRPLTEVEMDHYREPFLNPVDREPLWRFPNELPIAGEPANIVALVEEYMDWLHQSPVPKLLFWGTPGVLIPPAEAARLAKSLPNCKAVDIGPGLNLLQEDNPDLIGSEIARWLSTLEISG

SEQ ID NO: 1847 - protein, 277 aa, Synthetic construct
MFHYVDVGPRDGTPVLFLHGNPTSSYVWRNIIPHVAPTHRCIAPDLIGMGKSDKPDLGYFFDDHVRFMDAFIEALGLEEVVLVIHDWGSALGFHWAKRNPERVKGIAFMESIRPIPTWDEWPEFARETFQAFRTTDVGRKLIIDQNVFIEGTLPMGVVRPLTEVEMDHYREPFLNPVDREPLWRFPNELPIAGEPANIVALVEEYMDWLHQSPVPKLLFWGTPGVLIPPAEAARLAKSLPNCKAVDIGPGLNLLQEDNPDLIGSEIARWLSTLEISG

SEQ ID NO: 1848 - protein, 277 aa, Synthetic construct
MFHYVDVGPRDGTPVLFLHGNPTSSYVWRNIIPHVAPTHRCIAPDLIGMGKSDKPDLGYFFDDHVRFMDAFIEALGLEEVVLVIHDWGSALGFHWAKRNPERVKGIAFMEFVRPIPTWDEWPEFARETFQAFRTTDVGRKLIIDQNVFIEGTLPMGVVRPLTEVEMDHYREPFLNPVDREPLWRFPNELPIAGEPANIVALVEEYMDWLHQSPVPKLLFWGTPGVLIPPAEAARLAKSLPNCKAVDIGPGLNLLQEDNPDLIGSEIARWLSTLEISG

SEQ ID NO: 1849 - protein, 277 aa, Synthetic construct
MFHYVDVGPRDGTPVLFLHGNPTSSYVWRNIIPHVAPTHRCIAPDLIGMGKSDKPDLGYFFDDHVRFMDAFIEALGLEEVVLVIHDWGSALGFHWAKRNPERVKGIAFMEFLRPIPTWDEWPEFARETFQAFRTTDVGRKLIIDQNVFIEGTLPMGVVRPLTEVEMDHYREPFLNPVDREPLWRFPNELPIAGEPANIVALVEEYMDWLHQSPVPKLLFWGTPGVLIPPAEAARLAKSLPNCKAVDIGPGLNLLQEDNPDLIGSEIARWLSTLEISG

SEQ ID NO: 1850 - protein, 277 aa, Synthetic construct
MFHYVDVGPRDGTPVLFLHGNPTSSYVWRNIIPHVAPTHRCIAPDLIGMGKSDKPDLGYFFDDHVRFMDAFIEALGLEEVVLVIHDWGSALGFHWAKRNPERVKGIAFMEFMRPIPTWDEWPEFARETFQAFRTTDVGRKLIIDQNVFIEGTLPMGVVRPLTEVEMDHYREPFLNPVDREPLWRFPNELPIAGEPANIVALVEEYMDWLHQSPVPKLLFWGTPGVLIPPAEAARLAKSLPNCKAVDIGPGLNLLQEDNPDLIGSEIARWLSTLEISG

SEQ ID NO: 1851 - protein, 277 aa, Synthetic construct
MFHYVDVGPRDGTPVLFLHGNPTSSYVWRNIIPHVAPTHRCIAPDLIGMGKSDKPDLGYFFDDHVRFMDAFIEALGLEEVVLVIHDWGSALGFHWAKRNPERVKGIAFMEFARPIPTWDEWPEFARETFQAFRTTDVGRKLIIDQNVFIEGTLPMGVVRPLTEVEMDHYREPFLNPVDREPLWRFPNELPIAGEPANIVALVEEYMDWLHQSPVPKLLFWGTPGVLIPPAEAARLAKSLPNCKAVDIGPGLNLLQEDNPDLIGSEIARWLSTLEISG

SEQ ID NO: 1852 - protein, 277 aa, Synthetic construct
MFHYVDVGPRDGTPVLFLHGNPTSSYVWRNIIPHVAPTHRCIAPDLIGMGKSDKPDLGYFFDDHVRFMDAFIEALGLEEVVLVIHDWGSALGFHWAKRNPERVKGIAFMEFFRPIPTWDEWPEFARETFQAFRTTDVGRKLIIDQNVFIEGTLPMGVVRPLTEVEMDHYREPFLNPVDREPLWRFPNELPIAGEPANIVALVEEYMDWLHQSPVPKLLFWGTPGVLIPPAEAARLAKSLPNCKAVDIGPGLNLLQEDNPDLIGSEIARWLSTLEISG

SEQ ID NO: 1853 - protein, 277 aa, Synthetic construct
MFHYVDVGPRDGTPVLFLHGNPTSSYVWRNIIPHVAPTHRCIAPDLIGMGKSDKPDLGYFFDDHVRFMDAFIEALGLEEVVLVIHDWGSALGFHWAKRNPERVKGIAFMEFTRPIPTWDEWPEFARETFQAFRTTDVGRKLIIDQNVFIEGTLPMGVVRPLTEVEMDHYREPFLNPVDREPLWRFPNELPIAGEPANIVALVEEYMDWLHQSPVPKLLFWGTPGVLIPPAEAARLAKSLPNCKAVDIGPGLNLLQEDNPDLIGSEIARWLSTLEISG

SEQ ID NO: 1854 - protein, 277 aa, Synthetic construct
MFHYVDVGPRDGTPVLFLHGNPTSSYVWRNIIPHVAPTHRCIAPDLIGMGKSDKPDLGYFFDDHVRFMDAFIEALGLEEVVLVIHDWGSALGFHWAKRNPERVKGIAFMEFIAPIPTWDEWPEFARETFQAFRTTDVGRKLIIDQNVFIEGTLPMGVVRPLTEVEMDHYREPFLNPVDREPLWRFPNELPIAGEPANIVALVEEYMDWLHQSPVPKLLFWGTPGVLIPPAEAARLAKSLPNCKAVDIGPGLNLLQEDNPDLIGSEIARWLSTLEISG

SEQ ID NO: 1855 - protein, 277 aa, Synthetic construct
MFHYVDVGPRDGTPVLFLHGNPTSSYVWRNIIPHVAPTHRCIAPDLIGMGKSDKPDLGYFFDDHVRFMDAFIEALGLEEVVLVIHDWGSALGFHWAKRNPERVKGIAFMEFIVPIPTWDEWPEFARETFQAFRTTDVGRKLIIDQNVFIEGTLPMGVVRPLTEVEMDHYREPFLNPVDREPLWRFPNELPIAGEPANIVALVEEYMDWLHQSPVPKLLFWGTPGVLIPPAEAARLAKSLPNCKAVDIGPGLNLLQEDNPDLIGSEIARWLSTLEISG

SEQ ID NO: 1856 - protein, 277 aa, Synthetic construct
MFHYVDVGPRDGTPVLFLHGNPTSSYVWRNIIPHVAPTHRCIAPDLIGMGKSDKPDLGYFFDDHVRFMDAFIEALGLEEVVLVIHDWGSALGFHWAKRNPERVKGIAFMEFILPIPTWDEWPEFARETFQAFRTTDVGRKLIIDQNVFIEGTLPMGVVRPLTEVEMDHYREPFLNPVDREPLWRFPNELPIAGEPANIVALVEEYMDWLHQSPVPKLLFWGTPGVLIPPAEAARLAKSLPNCKAVDIGPGLNLLQEDNPDLIGSEIARWLSTLEISG

SEQ ID NO: 1857 - protein, 277 aa, Synthetic construct
MFHYVDVGPRDGTPVLFLHGNPTSSYVWRNIIPHVAPTHRCIAPDLIGMGKSDKPDLGYFFDDHVRFMDAFIEALGLEEVVLVIHDWGSALGFHWAKRNPERVKGIAFMEFITPIPTWDEWPEFARETFQAFRTTDVGRKLIIDQNVFIEGTLPMGVVRPLTEVEMDHYREPFLNPVDREPLWRFPNELPIAGEPANIVALVEEYMDWLHQSPVPKLLFWGTPGVLIPPAEAARLAKSLPNCKAVDIGPGLNLLQEDNPDLIGSEIARWLSTLEISG

SEQ ID NO: 1858 - protein, 277 aa, Synthetic construct
MFHYVDVGPRDGTPVLFLHGNPTSSYVWRNIIPHVAPTHRCIAPDLIGMGKSDKPDLGYFFDDHVRFMDAFIEALGLEEVVLVIHDWGSALGFHWAKRNPERVKGIAFMEFIGPIPTWDEWPEFARETFQAFRTTDVGRKLIIDQNVFIEGTLPMGVVRPLTEVEMDHYREPFLNPVDREPLWRFPNELPIAGEPANIVALVEEYMDWLHQSPVPKLLFWGTPGVLIPPAEAARLAKSLPNCKAVDIGPGLNLLQEDNPDLIGSEIARWLSTLEISG

SEQ ID NO: 1859 - protein, 277 aa, Synthetic construct
MFHYVDVGPRDGTPVLFLHGNPTSSYVWRNIIPHVAPTHRCIAPDLIGMGKSDKPDLGYFFDDHVRFMDAFIEALGLEEVVLVIHDWGSALGFHWAKRNPERVKGIAFMEFISPIPTWDEWPEFARETFQAFRTTDVGRKLIIDQNVFIEGTLPMGVVRPLTEVEMDHYREPFLNPVDREPLWRFPNELPIAGEPANIVALVEEYMDWLHQSPVPKLLFWGTPGVLIPPAEAARLAKSLPNCKAVDIGPGLNLLQEDNPDLIGSEIARWLSTLEISG

SEQ ID NO: 1860 - protein, 277 aa, Synthetic construct
MFHYVDVGPRDGTPVLFLHGNPTSSYVWRNIIPHVAPTHRCIAPDLIGMGKSDKPDLGYFFDDHVRFMDAFIEALGLEEVVLVIHDWGSALGFHWAKRNPERVKGIAFMEFIRTIPTWDEWPEFARETFQAFRTTDVGRKLIIDQNVFIEGTLPMGVVRPLTEVEMDHYREPFLNPVDREPLWRFPNELPIAGEPANIVALVEEYMDWLHQSPVPKLLFWGTPGVLIPPAEAARLAKSLPNCKAVDIGPGLNLLQEDNPDLIGSEIARWLSTLEISG

SEQ ID NO: 1861 - protein, 277 aa, Synthetic construct
MFHYVDVGPRDGTPVLFLHGNPTSSYVWRNIIPHVAPTHRCIAPDLIGMGKSDKPDLGYFFDDHVRFMDAFIEALGLEEVVLVIHDWGSALGFHWAKRNPERVKGIAFMEFIRAIPTWDEWPEFARETFQAFRTTDVGRKLIIDQNVFIEGTLPMGVVRPLTEVEMDHYREPFLNPVDREPLWRFPNELPIAGEPANIVALVEEYMDWLHQSPVPKLLFWGTPGVLIPPAEAARLAKSLPNCKAVDIGPGLNLLQEDNPDLIGSEIARWLSTLEISG

SEQ ID NO: 1862 - protein, 277 aa, Synthetic construct
MFHYVDVGPRDGTPVLFLHGNPTSSYVWRNIIPHVAPTHRCIAPDLIGMGKSDKPDLGYFFDDHVRFMDAFIEALGLEEVVLVIHDWGSALGFHWAKRNPERVKGIAFMEFIRRIPTWDEWPEFARETFQAFRTTDVGRKLIIDQNVFIEGTLPMGVVRPLTEVEMDHYREPFLNPVDREPLWRFPNELPIAGEPANIVALVEEYMDWLHQSPVPKLLFWGTPGVLIPPAEAARLAKSLPNCKAVDIGPGLNLLQEDNPDLIGSEIARWLSTLEISG

SEQ ID NO: 1863 - protein, 277 aa, Synthetic construct
MFHYVDVGPRDGTPVLFLHGNPTSSYVWRNIIPHVAPTHRCIAPDLIGMGKSDKPDLGYFFDDHVRFMDAFIEALGLEEVVLVIHDWGSALGFHWAKRNPERVKGIAFMEFIRSIPTWDEWPEFARETFQAFRTTDVGRKLIIDQNVFIEGTLPMGVVRPLTEVEMDHYREPFLNPVDREPLWRFPNELPIAGEPANIVALVEEYMDWLHQSPVPKLLFWGTPGVLIPPAEAARLAKSLPNCKAVDIGPGLNLLQEDNPDLIGSEIARWLSTLEISG

SEQ ID NO: 1864 - protein, 277 aa, Synthetic construct
MFHYVDVGPRDGTPVLFLHGNPTSSYVWRNIIPHVAPTHRCIAPDLIGMGKSDKPDLGYFFDDHVRFMDAFIEALGLEEVVLVIHDWGSALGFHWAKRNPERVKGIAFMEFIRQIPTWDEWPEFARETFQAFRTTDVGRKLIIDQNVFIEGTLPMGVVRPLTEVEMDHYREPFLNPVDREPLWRFPNELPIAGEPANIVALVEEYMDWLHQSPVPKLLFWGTPGVLIPPAEAARLAKSLPNCKAVDIGPGLNLLQEDNPDLIGSEIARWLSTLEISG

SEQ ID NO: 1865 - protein, 277 aa, Synthetic construct
MFHYVDVGPRDGTPVLFLHGNPTSSYVWRNIIPHVAPTHRCIAPDLIGMGKSDKPDLGYFFDDHVRFMDAFIEALGLEEVVLVIHDWGSALGFHWAKRNPERVKGIAFMEFIRLIPTWDEWPEFARETFQAFRTTDVGRKLIIDQNVFIEGTLPMGVVRPLTEVEMDHYREPFLNPVDREPLWRFPNELPIAGEPANIVALVEEYMDWLHQSPVPKLLFWGTPGVLIPPAEAARLAKSLPNCKAVDIGPGLNLLQEDNPDLIGSEIARWLSTLEISG

SEQ ID NO: 1866 - protein, 277 aa, Synthetic construct
MFHYVDVGPRDGTPVLFLHGNPTSSYVWRNIIPHVAPTHRCIAPDLIGMGKSDKPDLGYFFDDHVRFMDAFIEALGLEEVVLVIHDWGSALGFHWAKRNPERVKGIAFMEFIRPLPTWDEWPEFARETFQAFRTTDVGRKLIIDQNVFIEGTLPMGVVRPLTEVEMDHYREPFLNPVDREPLWRFPNELPIAGEPANIVALVEEYMDWLHQSPVPKLLFWGTPGVLIPPAEAARLAKSLPNCKAVDIGPGLNLLQEDNPDLIGSEIARWLSTLEISG

SEQ ID NO: 1867 - protein, 277 aa, Synthetic construct
MFHYVDVGPRDGTPVLFLHGNPTSSYVWRNIIPHVAPTHRCIAPDLIGMGKSDKPDLGYFFDDHVRFMDAFIEALGLEEVVLVIHDWGSALGFHWAKRNPERVKGIAFMEFIRPMPTWDEWPEFARETFQAFRTTDVGRKLIIDQNVFIEGTLPMGVVRPLTEVEMDHYREPFLNPVDREPLWRFPNELPIAGEPANIVALVEEYMDWLHQSPVPKLLFWGTPGVLIPPAEAARLAKSLPNCKAVDIGPGLNLLQEDNPDLIGSEIARWLSTLEISG

SEQ ID NO: 1868 - protein, 277 aa, Synthetic construct
MFHYVDVGPRDGTPVLFLHGNPTSSYVWRNIIPHVAPTHRCIAPDLIGMGKSDKPDLGYFFDDHVRFMDAFIEALGLEEVVLVIHDWGSALGFHWAKRNPERVKGIAFMEFIRPFPTWDEWPEFARETFQAFRTTDVGRKLIIDQNVFIEGTLPMGVVRPLTEVEMDHYREPFLNPVDREPLWRFPNELPIAGEPANIVALVEEYMDWLHQSPVPKLLFWGTPGVLIPPAEAARLAKSLPNCKAVDIGPGLNLLQEDNPDLIGSEIARWLSTLEISG

SEQ ID NO: 1869 - protein, 277 aa, Synthetic construct
MFHYVDVGPRDGTPVLFLHGNPTSSYVWRNIIPHVAPTHRCIAPDLIGMGKSDKPDLGYFFDDHVRFMDAFIEALGLEEVVLVIHDWGSALGFHWAKRNPERVKGIAFMEFIRPVPTWDEWPEFARETFQAFRTTDVGRKLIIDQNVFIEGTLPMGVVRPLTEVEMDHYREPFLNPVDREPLWRFPNELPIAGEPANIVALVEEYMDWLHQSPVPKLLFWGTPGVLIPPAEAARLAKSLPNCKAVDIGPGLNLLQEDNPDLIGSEIARWLSTLEISG

SEQ ID NO: 1870 - protein, 277 aa, Synthetic construct
MFHYVDVGPRDGTPVLFLHGNPTSSYVWRNIIPHVAPTHRCIAPDLIGMGKSDKPDLGYFFDDHVRFMDAFIEALGLEEVVLVIHDWGSALGFHWAKRNPERVKGIAFMEFIRPTPTWDEWPEFARETFQAFRTTDVGRKLIIDQNVFIEGTLPMGVVRPLTEVEMDHYREPFLNPVDREPLWRFPNELPIAGEPANIVALVEEYMDWLHQSPVPKLLFWGTPGVLIPPAEAARLAKSLPNCKAVDIGPGLNLLQEDNPDLIGSEIARWLSTLEISG

SEQ ID NO: 1871 - protein, 277 aa, Synthetic construct
MFHYVDVGPRDGTPVLFLHGNPTSSYVWRNIIPHVAPTHRCIAPDLIGMGKSDKPDLGYFFDDHVRFMDAFIEALGLEEVVLVIHDWGSALGFHWAKRNPERVKGIAFMEFIRPAPTWDEWPEFARETFQAFRTTDVGRKLIIDQNVFIEGTLPMGVVRPLTEVEMDHYREPFLNPVDREPLWRFPNELPIAGEPANIVALVEEYMDWLHQSPVPKLLFWGTPGVLIPPAEAARLAKSLPNCKAVDIGPGLNLLQEDNPDLIGSEIARWLSTLEISG

SEQ ID NO: 1872 - protein, 277 aa, Synthetic construct
MFHYVDVGPRDGTPVLFLHGNPTSSYVWRNIIPHVAPTHRCIAPDLIGMGKSDKPDLGYFFDDHVRFMDAFIEALGLEEVVLVIHDWGSALGFHWAKRNPERVKGIAFMEFIRPIATWDEWPEFARETFQAFRTTDVGRKLIIDQNVFIEGTLPMGVVRPLTEVEMDHYREPFLNPVDREPLWRFPNELPIAGEPANIVALVEEYMDWLHQSPVPKLLFWGTPGVLIPPAEAARLAKSLPNCKAVDIGPGLNLLQEDNPDLIGSEIARWLSTLEISG

SEQ ID NO: 1873 - protein, 277 aa, Synthetic construct
MFHYVDVGPRDGTPVLFLHGNPTSSYVWRNIIPHVAPTHRCIAPDLIGMGKSDKPDLGYFFDDHVRFMDAFIEALGLEEVVLVIHDWGSALGFHWAKRNPERVKGIAFMEFIRPILTWDEWPEFARETFQAFRTTDVGRKLIIDQNVFIEGTLPMGVVRPLTEVEMDHYREPFLNPVDREPLWRFPNELPIAGEPANIVALVEEYMDWLHQSPVPKLLFWGTPGVLIPPAEAARLAKSLPNCKAVDIGPGLNLLQEDNPDLIGSEIARWLSTLEISG

SEQ ID NO: 1874 - protein, 277 aa, Synthetic construct
MFHYVDVGPRDGTPVLFLHGNPTSSYVWRNIIPHVAPTHRCIAPDLIGMGKSDKPDLGYFFDDHVRFMDAFIEALGLEEVVLVIHDWGSALGFHWAKRNPERVKGIAFMEFIRPITTWDEWPEFARETFQAFRTTDVGRKLIIDQNVFIEGTLPMGVVRPLTEVEMDHYREPFLNPVDREPLWRFPNELPIAGEPANIVALVEEYMDWLHQSPVPKLLFWGTPGVLIPPAEAARLAKSLPNCKAVDIGPGLNLLQEDNPDLIGSEIARWLSTLEISG

SEQ ID NO: 1875 - protein, 277 aa, Synthetic construct
MFHYVDVGPRDGTPVLFLHGNPTSSYVWRNIIPHVAPTHRCIAPDLIGMGKSDKPDLGYFFDDHVRFMDAFIEALGLEEVVLVIHDWGSALGFHWAKRNPERVKGIAFMEFIRPIVTWDEWPEFARETFQAFRTTDVGRKLIIDQNVFIEGTLPMGVVRPLTEVEMDHYREPFLNPVDREPLWRFPNELPIAGEPANIVALVEEYMDWLHQSPVPKLLFWGTPGVLIPPAEAARLAKSLPNCKAVDIGPGLNLLQEDNPDLIGSEIARWLSTLEISG

SEQ ID NO: 1876 - protein, 277 aa, Synthetic construct
MFHYVDVGPRDGTPVLFLHGNPTSSYVWRNIIPHVAPTHRCIAPDLIGMGKSDKPDLGYFFDDHVRFMDAFIEALGLEEVVLVIHDWGSALGFHWAKRNPERVKGIAFMEFIRPIGTWDEWPEFARETFQAFRTTDVGRKLIIDQNVFIEGTLPMGVVRPLTEVEMDHYREPFLNPVDREPLWRFPNELPIAGEPANIVALVEEYMDWLHQSPVPKLLFWGTPGVLIPPAEAARLAKSLPNCKAVDIGPGLNLLQEDNPDLIGSEIARWLSTLEISG

SEQ ID NO: 1877 - protein, 277 aa, Synthetic construct
MFHYVDVGPRDGTPVLFLHGNPTSSYVWRNIIPHVAPTHRCIAPDLIGMGKSDKPDLGYFFDDHVRFMDAFIEALGLEEVVLVIHDWGSALGFHWAKRNPERVKGIAFMEFIRPISTWDEWPEFARETFQAFRTTDVGRKLIIDQNVFIEGTLPMGVVRPLTEVEMDHYREPFLNPVDREPLWRFPNELPIAGEPANIVALVEEYMDWLHQSPVPKLLFWGTPGVLIPPAEAARLAKSLPNCKAVDIGPGLNLLQEDNPDLIGSEIARWLSTLEISG

SEQ ID NO: 1878 - protein, 277 aa, Synthetic construct
MFHYVDVGPRDGTPVLFLHGNPTSSYVWRNIIPHVAPTHRCIAPDLIGMGKSDKPDLGYFFDDHVRFMDAFIEALGLEEVVLVIHDWGSALGFHWAKRNPERVKGIAFMEFIRPIPSWDEWPEFARETFQAFRTTDVGRKLIIDQNVFIEGTLPMGVVRPLTEVEMDHYREPFLNPVDREPLWRFPNELPIAGEPANIVALVEEYMDWLHQSPVPKLLFWGTPGVLIPPAEAARLAKSLPNCKAVDIGPGLNLLQEDNPDLIGSEIARWLSTLEISG

SEQ ID NO: 1879 - protein, 277 aa, Synthetic construct
MFHYVDVGPRDGTPVLFLHGNPTSSYVWRNIIPHVAPTHRCIAPDLIGMGKSDKPDLGYFFDDHVRFMDAFIEALGLEEVVLVIHDWGSALGFHWAKRNPERVKGIAFMEFIRPIPRWDEWPEFARETFQAFRTTDVGRKLIIDQNVFIEGTLPMGVVRPLTEVEMDHYREPFLNPVDREPLWRFPNELPIAGEPANIVALVEEYMDWLHQSPVPKLLFWGTPGVLIPPAEAARLAKSLPNCKAVDIGPGLNLLQEDNPDLIGSEIARWLSTLEISG

SEQ ID NO: 1880 - protein, 277 aa, Synthetic construct
MFHYVDVGPRDGTPVLFLHGNPTSSYVWRNIIPHVAPTHRCIAPDLIGMGKSDKPDLGYFFDDHVRFMDAFIEALGLEEVVLVIHDWGSALGFHWAKRNPERVKGIAFMEFIRPIPNWDEWPEFARETFQAFRTTDVGRKLIIDQNVFIEGTLPMGVVRPLTEVEMDHYREPFLNPVDREPLWRFPNELPIAGEPANIVALVEEYMDWLHQSPVPKLLFWGTPGVLIPPAEAARLAKSLPNCKAVDIGPGLNLLQEDNPDLIGSEIARWLSTLEISG

SEQ ID NO: 1881 - protein, 277 aa, Synthetic construct
MFHYVDVGPRDGTPVLFLHGNPTSSYVWRNIIPHVAPTHRCIAPDLIGMGKSDKPDLGYFFDDHVRFMDAFIEALGLEEVVLVIHDWGSALGFHWAKRNPERVKGIAFMEFIRPIPGWDEWPEFARETFQAFRTTDVGRKLIIDQNVFIEGTLPMGVVRPLTEVEMDHYREPFLNPVDREPLWRFPNELPIAGEPANIVALVEEYMDWLHQSPVPKLLFWGTPGVLIPPAEAARLAKSLPNCKAVDIGPGLNLLQEDNPDLIGSEIARWLSTLEISG

SEQ ID NO: 1882 - protein, 277 aa, Synthetic construct
MFHYVDVGPRDGTPVLFLHGNPTSSYVWRNIIPHVAPTHRCIAPDLIGMGKSDKPDLGYFFDDHVRFMDAFIEALGLEEVVLVIHDWGSALGFHWAKRNPERVKGIAFMEFIRPIPAWDEWPEFARETFQAFRTTDVGRKLIIDQNVFIEGTLPMGVVRPLTEVEMDHYREPFLNPVDREPLWRFPNELPIAGEPANIVALVEEYMDWLHQSPVPKLLFWGTPGVLIPPAEAARLAKSLPNCKAVDIGPGLNLLQEDNPDLIGSEIARWLSTLEISG

SEQ ID NO: 1883 - protein, 277 aa, Synthetic construct
MFHYVDVGPRDGTPVLFLHGNPTSSYVWRNIIPHVAPTHRCIAPDLIGMGKSDKPDLGYFFDDHVRFMDAFIEALGLEEVVLVIHDWGSALGFHWAKRNPERVKGIAFMEFIRPIPDWDEWPEFARETFQAFRTTDVGRKLIIDQNVFIEGTLPMGVVRPLTEVEMDHYREPFLNPVDREPLWRFPNELPIAGEPANIVALVEEYMDWLHQSPVPKLLFWGTPGVLIPPAEAARLAKSLPNCKAVDIGPGLNLLQEDNPDLIGSEIARWLSTLEISG

SEQ ID NO: 1884 - protein, 277 aa, Synthetic construct
MFHYVDVGPRDGTPVLFLHGNPTSSYVWRNIIPHVAPTHRCIAPDLIGMGKSDKPDLGYFFDDHVRFMDAFIEALGLEEVVLVIHDWGSALGFHWAKRNPERVKGIAFMEFIRPIPTFDEWPEFARETFQAFRTTDVGRKLIIDQNVFIEGTLPMGVVRPLTEVEMDHYREPFLNPVDREPLWRFPNELPIAGEPANIVALVEEYMDWLHQSPVPKLLFWGTPGVLIPPAEAARLAKSLPNCKAVDIGPGLNLLQEDNPDLIGSEIARWLSTLEISG

SEQ ID NO: 1885 - protein, 277 aa, Synthetic construct
MFHYVDVGPRDGTPVLFLHGNPTSSYVWRNIIPHVAPTHRCIAPDLIGMGKSDKPDLGYFFDDHVRFMDAFIEALGLEEVVLVIHDWGSALGFHWAKRNPERVKGIAFMEFIRPIPTYDEWPEFARETFQAFRTTDVGRKLIIDQNVFIEGTLPMGVVRPLTEVEMDHYREPFLNPVDREPLWRFPNELPIAGEPANIVALVEEYMDWLHQSPVPKLLFWGTPGVLIPPAEAARLAKSLPNCKAVDIGPGLNLLQEDNPDLIGSEIARWLSTLEISG

SEQ ID NO: 1886 - protein, 277 aa, Synthetic construct
MFHYVDVGPRDGTPVLFLHGNPTSSYVWRNIIPHVAPTHRCIAPDLIGMGKSDKPDLGYFFDDHVRFMDAFIEALGLEEVVLVIHDWGSALGFHWAKRNPERVKGIAFMEFIRPIPTLDEWPEFARETFQAFRTTDVGRKLIIDQNVFIEGTLPMGVVRPLTEVEMDHYREPFLNPVDREPLWRFPNELPIAGEPANIVALVEEYMDWLHQSPVPKLLFWGTPGVLIPPAEAARLAKSLPNCKAVDIGPGLNLLQEDNPDLIGSEIARWLSTLEISG

SEQ ID NO: 1887 - protein, 277 aa, Synthetic construct
MFHYVDVGPRDGTPVLFLHGNPTSSYVWRNIIPHVAPTHRCIAPDLIGMGKSDKPDLGYFFDDHVRFMDAFIEALGLEEVVLVIHDWGSALGFHWAKRNPERVKGIAFMEFIRPIPTADEWPEFARETFQAFRTTDVGRKLIIDQNVFIEGTLPMGVVRPLTEVEMDHYREPFLNPVDREPLWRFPNELPIAGEPANIVALVEEYMDWLHQSPVPKLLFWGTPGVLIPPAEAARLAKSLPNCKAVDIGPGLNLLQEDNPDLIGSEIARWLSTLEISG

SEQ ID NO: 1888 - protein, 277 aa, Synthetic construct
MFHYVDVGPRDGTPVLFLHGNPTSSYVWRNIIPHVAPTHRCIAPDLIGMGKSDKPDLGYFFDDHVRFMDAFIEALGLEEVVLVIHDWGSALGFHWAKRNPERVKGIAFMEFIRPIPTRDEWPEFARETFQAFRTTDVGRKLIIDQNVFIEGTLPMGVVRPLTEVEMDHYREPFLNPVDREPLWRFPNELPIAGEPANIVALVEEYMDWLHQSPVPKLLFWGTPGVLIPPAEAARLAKSLPNCKAVDIGPGLNLLQEDNPDLIGSEIARWLSTLEISG

SEQ ID NO: 1889 - protein, 277 aa, Synthetic construct
MFHYVDVGPRDGTPVLFLHGNPTSSYVWRNIIPHVAPTHRCIAPDLIGMGKSDKPDLGYFFDDHVRFMDAFIEALGLEEVVLVIHDWGSALGFHWAKRNPERVKGIAFMEFIRPIPTMDEWPEFARETFQAFRTTDVGRKLIIDQNVFIEGTLPMGVVRPLTEVEMDHYREPFLNPVDREPLWRFPNELPIAGEPANIVALVEEYMDWLHQSPVPKLLFWGTPGVLIPPAEAARLAKSLPNCKAVDIGPGLNLLQEDNPDLIGSEIARWLSTLEISG

SEQ ID NO: 1890 - protein, 277 aa, Synthetic construct
MFHYVDVGPRDGTPVLFLHGNPTSSYVWRNIIPHVAPTHRCIAPDLIGMGKSDKPDLGYFFDDHVRFMDAFIEALGLEEVVLVIHDWGSALGFHWAKRNPERVKGIAFMEFIRPIPTWEEWPEFARETFQAFRTTDVGRKLIIDQNVFIEGTLPMGVVRPLTEVEMDHYREPFLNPVDREPLWRFPNELPIAGEPANIVALVEEYMDWLHQSPVPKLLFWGTPGVLIPPAEAARLAKSLPNCKAVDIGPGLNLLQEDNPDLIGSEIARWLSTLEISG

SEQ ID NO: 1891 - protein, 277 aa, Synthetic construct
MFHYVDVGPRDGTPVLFLHGNPTSSYVWRNIIPHVAPTHRCIAPDLIGMGKSDKPDLGYFFDDHVRFMDAFIEALGLEEVVLVIHDWGSALGFHWAKRNPERVKGIAFMEFIRPIPTWAEWPEFARETFQAFRTTDVGRKLIIDQNVFIEGTLPMGVVRPLTEVEMDHYREPFLNPVDREPLWRFPNELPIAGEPANIVALVEEYMDWLHQSPVPKLLFWGTPGVLIPPAEAARLAKSLPNCKAVDIGPGLNLLQEDNPDLIGSEIARWLSTLEISG

SEQ ID NO: 1892 - protein, 277 aa, Synthetic construct
MFHYVDVGPRDGTPVLFLHGNPTSSYVWRNIIPHVAPTHRCIAPDLIGMGKSDKPDLGYFFDDHVRFMDAFIEALGLEEVVLVIHDWGSALGFHWAKRNPERVKGIAFMEFIRPIPTWSEWPEFARETFQAFRTTDVGRKLIIDQNVFIEGTLPMGVVRPLTEVEMDHYREPFLNPVDREPLWRFPNELPIAGEPANIVALVEEYMDWLHQSPVPKLLFWGTPGVLIPPAEAARLAKSLPNCKAVDIGPGLNLLQEDNPDLIGSEIARWLSTLEISG

SEQ ID NO: 1893 - protein, 277 aa, Synthetic construct
MFHYVDVGPRDGTPVLFLHGNPTSSYVWRNIIPHVAPTHRCIAPDLIGMGKSDKPDLGYFFDDHVRFMDAFIEALGLEEVVLVIHDWGSALGFHWAKRNPERVKGIAFMEFIRPIPTWNEWPEFARETFQAFRTTDVGRKLIIDQNVFIEGTLPMGVVRPLTEVEMDHYREPFLNPVDREPLWRFPNELPIAGEPANIVALVEEYMDWLHQSPVPKLLFWGTPGVLIPPAEAARLAKSLPNCKAVDIGPGLNLLQEDNPDLIGSEIARWLSTLEISG

SEQ ID NO: 1894 - protein, 277 aa, Synthetic construct
MFHYVDVGPRDGTPVLFLHGNPTSSYVWRNIIPHVAPTHRCIAPDLIGMGKSDKPDLGYFFDDHVRFMDAFIEALGLEEVVLVIHDWGSALGFHWAKRNPERVKGIAFMEFIRPIPTWQEWPEFARETFQAFRTTDVGRKLIIDQNVFIEGTLPMGVVRPLTEVEMDHYREPFLNPVDREPLWRFPNELPIAGEPANIVALVEEYMDWLHQSPVPKLLFWGTPGVLIPPAEAARLAKSLPNCKAVDIGPGLNLLQEDNPDLIGSEIARWLSTLEISG

SEQ ID NO: 1895 - protein, 277 aa, Synthetic construct
MFHYVDVGPRDGTPVLFLHGNPTSSYVWRNIIPHVAPTHRCIAPDLIGMGKSDKPDLGYFFDDHVRFMDAFIEALGLEEVVLVIHDWGSALGFHWAKRNPERVKGIAFMEFIRPIPTWGEWPEFARETFQAFRTTDVGRKLIIDQNVFIEGTLPMGVVRPLTEVEMDHYREPFLNPVDREPLWRFPNELPIAGEPANIVALVEEYMDWLHQSPVPKLLFWGTPGVLIPPAEAARLAKSLPNCKAVDIGPGLNLLQEDNPDLIGSEIARWLSTLEISG

SEQ ID NO: 1896 - protein, 277 aa, Synthetic construct
MFHYVDVGPRDGTPVLFLHGNPTSSYVWRNIIPHVAPTHRCIAPDLIGMGKSDKPDLGYFFDDHVRFMDAFIEALGLEEVVLVIHDWGSALGFHWAKRNPERVKGIAFMEFIRPIPTWDDWPEFARETFQAFRTTDVGRKLIIDQNVFIEGTLPMGVVRPLTEVEMDHYREPFLNPVDREPLWRFPNELPIAGEPANIVALVEEYMDWLHQSPVPKLLFWGTPGVLIPPAEAARLAKSLPNCKAVDIGPGLNLLQEDNPDLIGSEIARWLSTLEISG

SEQ ID NO: 1897 - protein, 277 aa, Synthetic construct
MFHYVDVGPRDGTPVLFLHGNPTSSYVWRNIIPHVAPTHRCIAPDLIGMGKSDKPDLGYFFDDHVRFMDAFIEALGLEEVVLVIHDWGSALGFHWAKRNPERVKGIAFMEFIRPIPTWDQWPEFARETFQAFRTTDVGRKLIIDQNVFIEGTLPMGVVRPLTEVEMDHYREPFLNPVDREPLWRFPNELPIAGEPANIVALVEEYMDWLHQSPVPKLLFWGTPGVLIPPAEAARLAKSLPNCKAVDIGPGLNLLQEDNPDLIGSEIARWLSTLEISG

SEQ ID NO: 1898 - protein, 277 aa, Synthetic construct
MFHYVDVGPRDGTPVLFLHGNPTSSYVWRNIIPHVAPTHRCIAPDLIGMGKSDKPDLGYFFDDHVRFMDAFIEALGLEEVVLVIHDWGSALGFHWAKRNPERVKGIAFMEFIRPIPTWDAWPEFARETFQAFRTTDVGRKLIIDQNVFIEGTLPMGVVRPLTEVEMDHYREPFLNPVDREPLWRFPNELPIAGEPANIVALVEEYMDWLHQSPVPKLLFWGTPGVLIPPAEAARLAKSLPNCKAVDIGPGLNLLQEDNPDLIGSEIARWLSTLEISG

SEQ ID NO: 1899 - protein, 277 aa, Synthetic construct
MFHYVDVGPRDGTPVLFLHGNPTSSYVWRNIIPHVAPTHRCIAPDLIGMGKSDKPDLGYFFDDHVRFMDAFIEALGLEEVVLVIHDWGSALGFHWAKRNPERVKGIAFMEFIRPIPTWDTWPEFARETFQAFRTTDVGRKLIIDQNVFIEGTLPMGVVRPLTEVEMDHYREPFLNPVDREPLWRFPNELPIAGEPANIVALVEEYMDWLHQSPVPKLLFWGTPGVLIPPAEAARLAKSLPNCKAVDIGPGLNLLQEDNPDLIGSEIARWLSTLEISG

SEQ ID NO: 1900 - protein, 277 aa, Synthetic construct
MFHYVDVGPRDGTPVLFLHGNPTSSYVWRNIIPHVAPTHRCIAPDLIGMGKSDKPDLGYFFDDHVRFMDAFIEALGLEEVVLVIHDWGSALGFHWAKRNPERVKGIAFMEFIRPIPTWDSWPEFARETFQAFRTTDVGRKLIIDQNVFIEGTLPMGVVRPLTEVEMDHYREPFLNPVDREPLWRFPNELPIAGEPANIVALVEEYMDWLHQSPVPKLLFWGTPGVLIPPAEAARLAKSLPNCKAVDIGPGLNLLQEDNPDLIGSEIARWLSTLEISG

SEQ ID NO: 1901 - protein, 277 aa, Synthetic construct
MFHYVDVGPRDGTPVLFLHGNPTSSYVWRNIIPHVAPTHRCIAPDLIGMGKSDKPDLGYFFDDHVRFMDAFIEALGLEEVVLVIHDWGSALGFHWAKRNPERVKGIAFMEFIRPIPTWDKWPEFARETFQAFRTTDVGRKLIIDQNVFIEGTLPMGVVRPLTEVEMDHYREPFLNPVDREPLWRFPNELPIAGEPANIVALVEEYMDWLHQSPVPKLLFWGTPGVLIPPAEAARLAKSLPNCKAVDIGPGLNLLQEDNPDLIGSEIARWLSTLEISG

SEQ ID NO: 1902 - protein, 277 aa, Synthetic construct
MFHYVDVGPRDGTPVLFLHGNPTSSYVWRNIIPHVAPTHRCIAPDLIGMGKSDKPDLGYFFDDHVRFMDAFIEALGLEEVVLVIHDWGSALGFHWAKRNPERVKGIAFMEFIRPIPTWDEFPEFARETFQAFRTTDVGRKLIIDQNVFIEGTLPMGVVRPLTEVEMDHYREPFLNPVDREPLWRFPNELPIAGEPANIVALVEEYMDWLHQSPVPKLLFWGTPGVLIPPAEAARLAKSLPNCKAVDIGPGLNLLQEDNPDLIGSEIARWLSTLEISG

SEQ ID NO: 1903 - protein, 277 aa, Synthetic construct
MFHYVDVGPRDGTPVLFLHGNPTSSYVWRNIIPHVAPTHRCIAPDLIGMGKSDKPDLGYFFDDHVRFMDAFIEALGLEEVVLVIHDWGSALGFHWAKRNPERVKGIAFMEFIRPIPTWDELPEFARETFQAFRTTDVGRKLIIDQNVFIEGTLPMGVVRPLTEVEMDHYREPFLNPVDREPLWRFPNELPIAGEPANIVALVEEYMDWLHQSPVPKLLFWGTPGVLIPPAEAARLAKSLPNCKAVDIGPGLNLLQEDNPDLIGSEIARWLSTLEISG

SEQ ID NO: 1904 - protein, 277 aa, Synthetic construct
MFHYVDVGPRDGTPVLFLHGNPTSSYVWRNIIPHVAPTHRCIAPDLIGMGKSDKPDLGYFFDDHVRFMDAFIEALGLEEVVLVIHDWGSALGFHWAKRNPERVKGIAFMEFIRPIPTWDEMPEFARETFQAFRTTDVGRKLIIDQNVFIEGTLPMGVVRPLTEVEMDHYREPFLNPVDREPLWRFPNELPIAGEPANIVALVEEYMDWLHQSPVPKLLFWGTPGVLIPPAEAARLAKSLPNCKAVDIGPGLNLLQEDNPDLIGSEIARWLSTLEISG

SEQ ID NO: 1905 - protein, 277 aa, Synthetic construct
MFHYVDVGPRDGTPVLFLHGNPTSSYVWRNIIPHVAPTHRCIAPDLIGMGKSDKPDLGYFFDDHVRFMDAFIEALGLEEVVLVIHDWGSALGFHWAKRNPERVKGIAFMEFIRPIPTWDEYPEFARETFQAFRTTDVGRKLIIDQNVFIEGTLPMGVVRPLTEVEMDHYREPFLNPVDREPLWRFPNELPIAGEPANIVALVEEYMDWLHQSPVPKLLFWGTPGVLIPPAEAARLAKSLPNCKAVDIGPGLNLLQEDNPDLIGSEIARWLSTLEISG

SEQ ID NO: 1906 - protein, 277 aa, Synthetic construct
MFHYVDVGPRDGTPVLFLHGNPTSSYVWRNIIPHVAPTHRCIAPDLIGMGKSDKPDLGYFFDDHVRFMDAFIEALGLEEVVLVIHDWGSALGFHWAKRNPERVKGIAFMEFIRPIPTWDEIPEFARETFQAFRTTDVGRKLIIDQNVFIEGTLPMGVVRPLTEVEMDHYREPFLNPVDREPLWRFPNELPIAGEPANIVALVEEYMDWLHQSPVPKLLFWGTPGVLIPPAEAARLAKSLPNCKAVDIGPGLNLLQEDNPDLIGSEIARWLSTLEISG

SEQ ID NO: 1907 - protein, 277 aa, Synthetic construct
MFHYVDVGPRDGTPVLFLHGNPTSSYVWRNIIPHVAPTHRCIAPDLIGMGKSDKPDLGYFFDDHVRFMDAFIEALGLEEVVLVIHDWGSALGFHWAKRNPERVKGIAFMEFIRPIPTWDEVPEFARETFQAFRTTDVGRKLIIDQNVFIEGTLPMGVVRPLTEVEMDHYREPFLNPVDREPLWRFPNELPIAGEPANIVALVEEYMDWLHQSPVPKLLFWGTPGVLIPPAEAARLAKSLPNCKAVDIGPGLNLLQEDNPDLIGSEIARWLSTLEISG

SEQ ID NO: 1908 - protein, 277 aa, Synthetic construct
MFHYVDVGPRDGTPVLFLHGNPTSSYVWRNIIPHVAPTHRCIAPDLIGMGKSDKPDLGYFFDDHVRFMDAFIEALGLEEVVLVIHDWGSALGFHWAKRNPERVKGIAFMEFIRPIPTWDEWSEFARETFQAFRTTDVGRKLIIDQNVFIEGTLPMGVVRPLTEVEMDHYREPFLNPVDREPLWRFPNELPIAGEPANIVALVEEYMDWLHQSPVPKLLFWGTPGVLIPPAEAARLAKSLPNCKAVDIGPGLNLLQEDNPDLIGSEIARWLSTLEISG

SEQ ID NO: 1909 - protein, 277 aa, Synthetic construct
MFHYVDVGPRDGTPVLFLHGNPTSSYVWRNIIPHVAPTHRCIAPDLIGMGKSDKPDLGYFFDDHVRFMDAFIEALGLEEVVLVIHDWGSALGFHWAKRNPERVKGIAFMEFIRPIPTWDEWGEFARETFQAFRTTDVGRKLIIDQNVFIEGTLPMGVVRPLTEVEMDHYREPFLNPVDREPLWRFPNELPIAGEPANIVALVEEYMDWLHQSPVPKLLFWGTPGVLIPPAEAARLAKSLPNCKAVDIGPGLNLLQEDNPDLIGSEIARWLSTLEISG

SEQ ID NO: 1910 - protein, 277 aa, Synthetic construct
MFHYVDVGPRDGTPVLFLHGNPTSSYVWRNIIPHVAPTHRCIAPDLIGMGKSDKPDLGYFFDDHVRFMDAFIEALGLEEVVLVIHDWGSALGFHWAKRNPERVKGIAFMEFIRPIPTWDEWTEFARETFQAFRTTDVGRKLIIDQNVFIEGTLPMGVVRPLTEVEMDHYREPFLNPVDREPLWRFPNELPIAGEPANIVALVEEYMDWLHQSPVPKLLFWGTPGVLIPPAEAARLAKSLPNCKAVDIGPGLNLLQEDNPDLIGSEIARWLSTLEISG

SEQ ID NO: 1911 - protein, 277 aa, Synthetic construct
MFHYVDVGPRDGTPVLFLHGNPTSSYVWRNIIPHVAPTHRCIAPDLIGMGKSDKPDLGYFFDDHVRFMDAFIEALGLEEVVLVIHDWGSALGFHWAKRNPERVKGIAFMEFIRPIPTWDEWDEFARETFQAFRTTDVGRKLIIDQNVFIEGTLPMGVVRPLTEVEMDHYREPFLNPVDREPLWRFPNELPIAGEPANIVALVEEYMDWLHQSPVPKLLFWGTPGVLIPPAEAARLAKSLPNCKAVDIGPGLNLLQEDNPDLIGSEIARWLSTLEISG

SEQ ID NO: 1912 - protein, 277 aa, Synthetic construct
MFHYVDVGPRDGTPVLFLHGNPTSSYVWRNIIPHVAPTHRCIAPDLIGMGKSDKPDLGYFFDDHVRFMDAFIEALGLEEVVLVIHDWGSALGFHWAKRNPERVKGIAFMEFIRPIPTWDEWAEFARETFQAFRTTDVGRKLIIDQNVFIEGTLPMGVVRPLTEVEMDHYREPFLNPVDREPLWRFPNELPIAGEPANIVALVEEYMDWLHQSPVPKLLFWGTPGVLIPPAEAARLAKSLPNCKAVDIGPGLNLLQEDNPDLIGSEIARWLSTLEISG

SEQ ID NO: 1913 - protein, 277 aa, Synthetic construct
MFHYVDVGPRDGTPVLFLHGNPTSSYVWRNIIPHVAPTHRCIAPDLIGMGKSDKPDLGYFFDDHVRFMDAFIEALGLEEVVLVIHDWGSALGFHWAKRNPERVKGIAFMEFIRPIPTWDEWNEFARETFQAFRTTDVGRKLIIDQNVFIEGTLPMGVVRPLTEVEMDHYREPFLNPVDREPLWRFPNELPIAGEPANIVALVEEYMDWLHQSPVPKLLFWGTPGVLIPPAEAARLAKSLPNCKAVDIGPGLNLLQEDNPDLIGSEIARWLSTLEISG

SEQ ID NO: 1914 - protein, 277 aa, Synthetic construct
MFHYVDVGPRDGTPVLFLHGNPTSSYVWRNIIPHVAPTHRCIAPDLIGMGKSDKPDLGYFFDDHVRFMDAFIEALGLEEVVLVIHDWGSALGFHWAKRNPERVKGIAFMEFIRPIPTWDEWPDFARETFQAFRTTDVGRKLIIDQNVFIEGTLPMGVVRPLTEVEMDHYREPFLNPVDREPLWRFPNELPIAGEPANIVALVEEYMDWLHQSPVPKLLFWGTPGVLIPPAEAARLAKSLPNCKAVDIGPGLNLLQEDNPDLIGSEIARWLSTLEISG

SEQ ID NO: 1915 - protein, 277 aa, Synthetic construct
MFHYVDVGPRDGTPVLFLHGNPTSSYVWRNIIPHVAPTHRCIAPDLIGMGKSDKPDLGYFFDDHVRFMDAFIEALGLEEVVLVIHDWGSALGFHWAKRNPERVKGIAFMEFIRPIPTWDEWPAFARETFQAFRTTDVGRKLIIDQNVFIEGTLPMGVVRPLTEVEMDHYREPFLNPVDREPLWRFPNELPIAGEPANIVALVEEYMDWLHQSPVPKLLFWGTPGVLIPPAEAARLAKSLPNCKAVDIGPGLNLLQEDNPDLIGSEIARWLSTLEISG

SEQ ID NO: 1916 - protein, 277 aa, Synthetic construct
MFHYVDVGPRDGTPVLFLHGNPTSSYVWRNIIPHVAPTHRCIAPDLIGMGKSDKPDLGYFFDDHVRFMDAFIEALGLEEVVLVIHDWGSALGFHWAKRNPERVKGIAFMEFIRPIPTWDEWPPFARETFQAFRTTDVGRKLIIDQNVFIEGTLPMGVVRPLTEVEMDHYREPFLNPVDREPLWRFPNELPIAGEPANIVALVEEYMDWLHQSPVPKLLFWGTPGVLIPPAEAARLAKSLPNCKAVDIGPGLNLLQEDNPDLIGSEIARWLSTLEISG

SEQ ID NO: 1917 - protein, 277 aa, Synthetic construct
MFHYVDVGPRDGTPVLFLHGNPTSSYVWRNIIPHVAPTHRCIAPDLIGMGKSDKPDLGYFFDDHVRFMDAFIEALGLEEVVLVIHDWGSALGFHWAKRNPERVKGIAFMEFIRPIPTWDEWPQFARETFQAFRTTDVGRKLIIDQNVFIEGTLPMGVVRPLTEVEMDHYREPFLNPVDREPLWRFPNELPIAGEPANIVALVEEYMDWLHQSPVPKLLFWGTPGVLIPPAEAARLAKSLPNCKAVDIGPGLNLLQEDNPDLIGSEIARWLSTLEISG

SEQ ID NO: 1918 - protein, 277 aa, Synthetic construct
MFHYVDVGPRDGTPVLFLHGNPTSSYVWRNIIPHVAPTHRCIAPDLIGMGKSDKPDLGYFFDDHVRFMDAFIEALGLEEVVLVIHDWGSALGFHWAKRNPERVKGIAFMEFIRPIPTWDEWPKFARETFQAFRTTDVGRKLIIDQNVFIEGTLPMGVVRPLTEVEMDHYREPFLNPVDREPLWRFPNELPIAGEPANIVALVEEYMDWLHQSPVPKLLFWGTPGVLIPPAEAARLAKSLPNCKAVDIGPGLNLLQEDNPDLIGSEIARWLSTLEISG

SEQ ID NO: 1919 - protein, 277 aa, Synthetic construct
MFHYVDVGPRDGTPVLFLHGNPTSSYVWRNIIPHVAPTHRCIAPDLIGMGKSDKPDLGYFFDDHVRFMDAFIEALGLEEVVLVIHDWGSALGFHWAKRNPERVKGIAFMEFIRPIPTWDEWPSFARETFQAFRTTDVGRKLIIDQNVFIEGTLPMGVVRPLTEVEMDHYREPFLNPVDREPLWRFPNELPIAGEPANIVALVEEYMDWLHQSPVPKLLFWGTPGVLIPPAEAARLAKSLPNCKAVDIGPGLNLLQEDNPDLIGSEIARWLSTLEISG

SEQ ID NO: 1920 - protein, 277 aa, Synthetic construct
MFHYVDVGPRDGTPVLFLHGNPTSSYVWRNIIPHVAPTHRCIAPDLIGMGKSDKPDLGYFFDDHVRFMDAFIEALGLEEVVLVIHDWGSALGFHWAKRNPERVKGIAFMEFIRPIPTWDEWPEAARETFQAFRTTDVGRKLIIDQNVFIEGTLPMGVVRPLTEVEMDHYREPFLNPVDREPLWRFPNELPIAGEPANIVALVEEYMDWLHQSPVPKLLFWGTPGVLIPPAEAARLAKSLPNCKAVDIGPGLNLLQEDNPDLIGSEIARWLSTLEISG

SEQ ID NO: 1921 - protein, 277 aa, Synthetic construct
MFHYVDVGPRDGTPVLFLHGNPTSSYVWRNIIPHVAPTHRCIAPDLIGMGKSDKPDLGYFFDDHVRFMDAFIEALGLEEVVLVIHDWGSALGFHWAKRNPERVKGIAFMEFIRPIPTWDEWPEPARETFQAFRTTDVGRKLIIDQNVFIEGTLPMGVVRPLTEVEMDHYREPFLNPVDREPLWRFPNELPIAGEPANIVALVEEYMDWLHQSPVPKLLFWGTPGVLIPPAEAARLAKSLPNCKAVDIGPGLNLLQEDNPDLIGSEIARWLSTLEISG

SEQ ID NO: 1922 - protein, 277 aa, Synthetic construct
MFHYVDVGPRDGTPVLFLHGNPTSSYVWRNIIPHVAPTHRCIAPDLIGMGKSDKPDLGYFFDDHVRFMDAFIEALGLEEVVLVIHDWGSALGFHWAKRNPERVKGIAFMEFIRPIPTWDEWPEGARETFQAFRTTDVGRKLIIDQNVFIEGTLPMGVVRPLTEVEMDHYREPFLNPVDREPLWRFPNELPIAGEPANIVALVEEYMDWLHQSPVPKLLFWGTPGVLIPPAEAARLAKSLPNCKAVDIGPGLNLLQEDNPDLIGSEIARWLSTLEISG

SEQ ID NO: 1923 - protein, 277 aa, Synthetic construct
MFHYVDVGPRDGTPVLFLHGNPTSSYVWRNIIPHVAPTHRCIAPDLIGMGKSDKPDLGYFFDDHVRFMDAFIEALGLEEVVLVIHDWGSALGFHWAKRNPERVKGIAFMEFIRPIPTWDEWPEKARETFQAFRTTDVGRKLIIDQNVFIEGTLPMGVVRPLTEVEMDHYREPFLNPVDREPLWRFPNELPIAGEPANIVALVEEYMDWLHQSPVPKLLFWGTPGVLIPPAEAARLAKSLPNCKAVDIGPGLNLLQEDNPDLIGSEIARWLSTLEISG

SEQ ID NO: 1924 - protein, 277 aa, Synthetic construct
MFHYVDVGPRDGTPVLFLHGNPTSSYVWRNIIPHVAPTHRCIAPDLIGMGKSDKPDLGYFFDDHVRFMDAFIEALGLEEVVLVIHDWGSALGFHWAKRNPERVKGIAFMEFIRPIPTWDEWPEEARETFQAFRTTDVGRKLIIDQNVFIEGTLPMGVVRPLTEVEMDHYREPFLNPVDREPLWRFPNELPIAGEPANIVALVEEYMDWLHQSPVPKLLFWGTPGVLIPPAEAARLAKSLPNCKAVDIGPGLNLLQEDNPDLIGSEIARWLSTLEISG

SEQ ID NO: 1925 - protein, 277 aa, Synthetic construct
MFHYVDVGPRDGTPVLFLHGNPTSSYVWRNIIPHVAPTHRCIAPDLIGMGKSDKPDLGYFFDDHVRFMDAFIEALGLEEVVLVIHDWGSALGFHWAKRNPERVKGIAFMEFIRPIPTWDEWPESARETFQAFRTTDVGRKLIIDQNVFIEGTLPMGVVRPLTEVEMDHYREPFLNPVDREPLWRFPNELPIAGEPANIVALVEEYMDWLHQSPVPKLLFWGTPGVLIPPAEAARLAKSLPNCKAVDIGPGLNLLQEDNPDLIGSEIARWLSTLEISG

SEQ ID NO: 1926 - protein, 277 aa, Synthetic construct
MFHYVDVGPRDGTPVLFLHGNPTSSYVWRNIIPHVAPTHRCIAPDLIGMGKSDKPDLGYFFDDHVRFMDAFIEALGLEEVVLVIHDWGSALGFHWAKRNPERVKGIAFMEFIRPIPTWDEWPEFGRETFQAFRTTDVGRKLIIDQNVFIEGTLPMGVVRPLTEVEMDHYREPFLNPVDREPLWRFPNELPIAGEPANIVALVEEYMDWLHQSPVPKLLFWGTPGVLIPPAEAARLAKSLPNCKAVDIGPGLNLLQEDNPDLIGSEIARWLSTLEISG

SEQ ID NO: 1927 - protein, 277 aa, Synthetic construct
MFHYVDVGPRDGTPVLFLHGNPTSSYVWRNIIPHVAPTHRCIAPDLIGMGKSDKPDLGYFFDDHVRFMDAFIEALGLEEVVLVIHDWGSALGFHWAKRNPERVKGIAFMEFIRPIPTWDEWPEFVRETFQAFRTTDVGRKLIIDQNVFIEGTLPMGVVRPLTEVEMDHYREPFLNPVDREPLWRFPNELPIAGEPANIVALVEEYMDWLHQSPVPKLLFWGTPGVLIPPAEAARLAKSLPNCKAVDIGPGLNLLQEDNPDLIGSEIARWLSTLEISG

SEQ ID NO: 1928 - protein, 277 aa, Synthetic construct
MFHYVDVGPRDGTPVLFLHGNPTSSYVWRNIIPHVAPTHRCIAPDLIGMGKSDKPDLGYFFDDHVRFMDAFIEALGLEEVVLVIHDWGSALGFHWAKRNPERVKGIAFMEFIRPIPTWDEWPEFTRETFQAFRTTDVGRKLIIDQNVFIEGTLPMGVVRPLTEVEMDHYREPFLNPVDREPLWRFPNELPIAGEPANIVALVEEYMDWLHQSPVPKLLFWGTPGVLIPPAEAARLAKSLPNCKAVDIGPGLNLLQEDNPDLIGSEIARWLSTLEISG

SEQ ID NO: 1929 - protein, 277 aa, Synthetic construct
MFHYVDVGPRDGTPVLFLHGNPTSSYVWRNIIPHVAPTHRCIAPDLIGMGKSDKPDLGYFFDDHVRFMDAFIEALGLEEVVLVIHDWGSALGFHWAKRNPERVKGIAFMEFIRPIPTWDEWPEFSRETFQAFRTTDVGRKLIIDQNVFIEGTLPMGVVRPLTEVEMDHYREPFLNPVDREPLWRFPNELPIAGEPANIVALVEEYMDWLHQSPVPKLLFWGTPGVLIPPAEAARLAKSLPNCKAVDIGPGLNLLQEDNPDLIGSEIARWLSTLEISG

SEQ ID NO: 1930 - protein, 277 aa, Synthetic construct
MFHYVDVGPRDGTPVLFLHGNPTSSYVWRNIIPHVAPTHRCIAPDLIGMGKSDKPDLGYFFDDHVRFMDAFIEALGLEEVVLVIHDWGSALGFHWAKRNPERVKGIAFMEFIRPIPTWDEWPEFMRETFQAFRTTDVGRKLIIDQNVFIEGTLPMGVVRPLTEVEMDHYREPFLNPVDREPLWRFPNELPIAGEPANIVALVEEYMDWLHQSPVPKLLFWGTPGVLIPPAEAARLAKSLPNCKAVDIGPGLNLLQEDNPDLIGSEIARWLSTLEISG

SEQ ID NO: 1931 - protein, 277 aa, Synthetic construct
MFHYVDVGPRDGTPVLFLHGNPTSSYVWRNIIPHVAPTHRCIAPDLIGMGKSDKPDLGYFFDDHVRFMDAFIEALGLEEVVLVIHDWGSALGFHWAKRNPERVKGIAFMEFIRPIPTWDEWPEFIRETFQAFRTTDVGRKLIIDQNVFIEGTLPMGVVRPLTEVEMDHYREPFLNPVDREPLWRFPNELPIAGEPANIVALVEEYMDWLHQSPVPKLLFWGTPGVLIPPAEAARLAKSLPNCKAVDIGPGLNLLQEDNPDLIGSEIARWLSTLEISG

SEQ ID NO: 1932 - protein, 277 aa, Synthetic construct
MFHYVDVGPRDGTPVLFLHGNPTSSYVWRNIIPHVAPTHRCIAPDLIGMGKSDKPDLGYFFDDHVRFMDAFIEALGLEEVVLVIHDWGSALGFHWAKRNPERVKGIAFMEFIRPIPTWDEWPEFAKETFQAFRTTDVGRKLIIDQNVFIEGTLPMGVVRPLTEVEMDHYREPFLNPVDREPLWRFPNELPIAGEPANIVALVEEYMDWLHQSPVPKLLFWGTPGVLIPPAEAARLAKSLPNCKAVDIGPGLNLLQEDNPDLIGSEIARWLSTLEISG

SEQ ID NO: 1933 - protein, 277 aa, Synthetic construct
MFHYVDVGPRDGTPVLFLHGNPTSSYVWRNIIPHVAPTHRCIAPDLIGMGKSDKPDLGYFFDDHVRFMDAFIEALGLEEVVLVIHDWGSALGFHWAKRNPERVKGIAFMEFIRPIPTWDEWPEFAQETFQAFRTTDVGRKLIIDQNVFIEGTLPMGVVRPLTEVEMDHYREPFLNPVDREPLWRFPNELPIAGEPANIVALVEEYMDWLHQSPVPKLLFWGTPGVLIPPAEAARLAKSLPNCKAVDIGPGLNLLQEDNPDLIGSEIARWLSTLEISG

SEQ ID NO: 1934 - protein, 277 aa, Synthetic construct
MFHYVDVGPRDGTPVLFLHGNPTSSYVWRNIIPHVAPTHRCIAPDLIGMGKSDKPDLGYFFDDHVRFMDAFIEALGLEEVVLVIHDWGSALGFHWAKRNPERVKGIAFMEFIRPIPTWDEWPEFAAETFQAFRTTDVGRKLIIDQNVFIEGTLPMGVVRPLTEVEMDHYREPFLNPVDREPLWRFPNELPIAGEPANIVALVEEYMDWLHQSPVPKLLFWGTPGVLIPPAEAARLAKSLPNCKAVDIGPGLNLLQEDNPDLIGSEIARWLSTLEISG

SEQ ID NO: 1935 - protein, 277 aa, Synthetic construct
MFHYVDVGPRDGTPVLFLHGNPTSSYVWRNIIPHVAPTHRCIAPDLIGMGKSDKPDLGYFFDDHVRFMDAFIEALGLEEVVLVIHDWGSALGFHWAKRNPERVKGIAFMEFIRPIPTWDEWPEFALETFQAFRTTDVGRKLIIDQNVFIEGTLPMGVVRPLTEVEMDHYREPFLNPVDREPLWRFPNELPIAGEPANIVALVEEYMDWLHQSPVPKLLFWGTPGVLIPPAEAARLAKSLPNCKAVDIGPGLNLLQEDNPDLIGSEIARWLSTLEISG

SEQ ID NO: 1936 - protein, 277 aa, Synthetic construct
MFHYVDVGPRDGTPVLFLHGNPTSSYVWRNIIPHVAPTHRCIAPDLIGMGKSDKPDLGYFFDDHVRFMDAFIEALGLEEVVLVIHDWGSALGFHWAKRNPERVKGIAFMEFIRPIPTWDEWPEFAVETFQAFRTTDVGRKLIIDQNVFIEGTLPMGVVRPLTEVEMDHYREPFLNPVDREPLWRFPNELPIAGEPANIVALVEEYMDWLHQSPVPKLLFWGTPGVLIPPAEAARLAKSLPNCKAVDIGPGLNLLQEDNPDLIGSEIARWLSTLEISG

SEQ ID NO: 1937 - protein, 277 aa, Synthetic construct
MFHYVDVGPRDGTPVLFLHGNPTSSYVWRNIIPHVAPTHRCIAPDLIGMGKSDKPDLGYFFDDHVRFMDAFIEALGLEEVVLVIHDWGSALGFHWAKRNPERVKGIAFMEFIRPIPTWDEWPEFAHETFQAFRTTDVGRKLIIDQNVFIEGTLPMGVVRPLTEVEMDHYREPFLNPVDREPLWRFPNELPIAGEPANIVALVEEYMDWLHQSPVPKLLFWGTPGVLIPPAEAARLAKSLPNCKAVDIGPGLNLLQEDNPDLIGSEIARWLSTLEISG

SEQ ID NO: 1938 - protein, 277 aa, Synthetic construct
MFHYVDVGPRDGTPVLFLHGNPTSSYVWRNIIPHVAPTHRCIAPDLIGMGKSDKPDLGYFFDDHVRFMDAFIEALGLEEVVLVIHDWGSALGFHWAKRNPERVKGIAFMEFIRPIPTWDEWPEFARKTFQAFRTTDVGRKLIIDQNVFIEGTLPMGVVRPLTEVEMDHYREPFLNPVDREPLWRFPNELPIAGEPANIVALVEEYMDWLHQSPVPKLLFWGTPGVLIPPAEAARLAKSLPNCKAVDIGPGLNLLQEDNPDLIGSEIARWLSTLEISG

SEQ ID NO: 1939 - protein, 277 aa, Synthetic construct
MFHYVDVGPRDGTPVLFLHGNPTSSYVWRNIIPHVAPTHRCIAPDLIGMGKSDKPDLGYFFDDHVRFMDAFIEALGLEEVVLVIHDWGSALGFHWAKRNPERVKGIAFMEFIRPIPTWDEWPEFARATFQAFRTTDVGRKLIIDQNVFIEGTLPMGVVRPLTEVEMDHYREPFLNPVDREPLWRFPNELPIAGEPANIVALVEEYMDWLHQSPVPKLLFWGTPGVLIPPAEAARLAKSLPNCKAVDIGPGLNLLQEDNPDLIGSEIARWLSTLEISG

SEQ ID NO: 1940 - protein, 277 aa, Synthetic construct
MFHYVDVGPRDGTPVLFLHGNPTSSYVWRNIIPHVAPTHRCIAPDLIGMGKSDKPDLGYFFDDHVRFMDAFIEALGLEEVVLVIHDWGSALGFHWAKRNPERVKGIAFMEFIRPIPTWDEWPEFARQTFQAFRTTDVGRKLIIDQNVFIEGTLPMGVVRPLTEVEMDHYREPFLNPVDREPLWRFPNELPIAGEPANIVALVEEYMDWLHQSPVPKLLFWGTPGVLIPPAEAARLAKSLPNCKAVDIGPGLNLLQEDNPDLIGSEIARWLSTLEISG

SEQ ID NO: 1941 - protein, 277 aa, Synthetic construct
MFHYVDVGPRDGTPVLFLHGNPTSSYVWRNIIPHVAPTHRCIAPDLIGMGKSDKPDLGYFFDDHVRFMDAFIEALGLEEVVLVIHDWGSALGFHWAKRNPERVKGIAFMEFIRPIPTWDEWPEFARRTFQAFRTTDVGRKLIIDQNVFIEGTLPMGVVRPLTEVEMDHYREPFLNPVDREPLWRFPNELPIAGEPANIVALVEEYMDWLHQSPVPKLLFWGTPGVLIPPAEAARLAKSLPNCKAVDIGPGLNLLQEDNPDLIGSEIARWLSTLEISG

SEQ ID NO: 1942 - protein, 277 aa, Synthetic construct
MFHYVDVGPRDGTPVLFLHGNPTSSYVWRNIIPHVAPTHRCIAPDLIGMGKSDKPDLGYFFDDHVRFMDAFIEALGLEEVVLVIHDWGSALGFHWAKRNPERVKGIAFMEFIRPIPTWDEWPEFARPTFQAFRTTDVGRKLIIDQNVFIEGTLPMGVVRPLTEVEMDHYREPFLNPVDREPLWRFPNELPIAGEPANIVALVEEYMDWLHQSPVPKLLFWGTPGVLIPPAEAARLAKSLPNCKAVDIGPGLNLLQEDNPDLIGSEIARWLSTLEISG

SEQ ID NO: 1943 - protein, 277 aa, Synthetic construct
MFHYVDVGPRDGTPVLFLHGNPTSSYVWRNIIPHVAPTHRCIAPDLIGMGKSDKPDLGYFFDDHVRFMDAFIEALGLEEVVLVIHDWGSALGFHWAKRNPERVKGIAFMEFIRPIPTWDEWPEFARSTFQAFRTTDVGRKLIIDQNVFIEGTLPMGVVRPLTEVEMDHYREPFLNPVDREPLWRFPNELPIAGEPANIVALVEEYMDWLHQSPVPKLLFWGTPGVLIPPAEAARLAKSLPNCKAVDIGPGLNLLQEDNPDLIGSEIARWLSTLEISG

SEQ ID NO: 1944 - protein, 277 aa, Synthetic construct
MFHYVDVGPRDGTPVLFLHGNPTSSYVWRNIIPHVAPTHRCIAPDLIGMGKSDKPDLGYFFDDHVRFMDAFIEALGLEEVVLVIHDWGSALGFHWAKRNPERVKGIAFMEFIRPIPTWDEWPEFARERFQAFRTTDVGRKLIIDQNVFIEGTLPMGVVRPLTEVEMDHYREPFLNPVDREPLWRFPNELPIAGEPANIVALVEEYMDWLHQSPVPKLLFWGTPGVLIPPAEAARLAKSLPNCKAVDIGPGLNLLQEDNPDLIGSEIARWLSTLEISG

SEQ ID NO: 1945 - protein, 277 aa, Synthetic construct
MFHYVDVGPRDGTPVLFLHGNPTSSYVWRNIIPHVAPTHRCIAPDLIGMGKSDKPDLGYFFDDHVRFMDAFIEALGLEEVVLVIHDWGSALGFHWAKRNPERVKGIAFMEFIRPIPTWDEWPEFARELFQAFRTTDVGRKLIIDQNVFIEGTLPMGVVRPLTEVEMDHYREPFLNPVDREPLWRFPNELPIAGEPANIVALVEEYMDWLHQSPVPKLLFWGTPGVLIPPAEAARLAKSLPNCKAVDIGPGLNLLQEDNPDLIGSEIARWLSTLEISG

SEQ ID NO: 1946 - protein, 277 aa, Synthetic construct
MFHYVDVGPRDGTPVLFLHGNPTSSYVWRNIIPHVAPTHRCIAPDLIGMGKSDKPDLGYFFDDHVRFMDAFIEALGLEEVVLVIHDWGSALGFHWAKRNPERVKGIAFMEFIRPIPTWDEWPEFAREAFQAFRTTDVGRKLIIDQNVFIEGTLPMGVVRPLTEVEMDHYREPFLNPVDREPLWRFPNELPIAGEPANIVALVEEYMDWLHQSPVPKLLFWGTPGVLIPPAEAARLAKSLPNCKAVDIGPGLNLLQEDNPDLIGSEIARWLSTLEISG

SEQ ID NO: 1947 - protein, 277 aa, Synthetic construct
MFHYVDVGPRDGTPVLFLHGNPTSSYVWRNIIPHVAPTHRCIAPDLIGMGKSDKPDLGYFFDDHVRFMDAFIEALGLEEVVLVIHDWGSALGFHWAKRNPERVKGIAFMEFIRPIPTWDEWPEFAREIFQAFRTTDVGRKLIIDQNVFIEGTLPMGVVRPLTEVEMDHYREPFLNPVDREPLWRFPNELPIAGEPANIVALVEEYMDWLHQSPVPKLLFWGTPGVLIPPAEAARLAKSLPNCKAVDIGPGLNLLQEDNPDLIGSEIARWLSTLEISG

SEQ ID NO: 1948 - protein, 277 aa, Synthetic construct
MFHYVDVGPRDGTPVLFLHGNPTSSYVWRNIIPHVAPTHRCIAPDLIGMGKSDKPDLGYFFDDHVRFMDAFIEALGLEEVVLVIHDWGSALGFHWAKRNPERVKGIAFMEFIRPIPTWDEWPEFAREVFQAFRTTDVGRKLIIDQNVFIEGTLPMGVVRPLTEVEMDHYREPFLNPVDREPLWRFPNELPIAGEPANIVALVEEYMDWLHQSPVPKLLFWGTPGVLIPPAEAARLAKSLPNCKAVDIGPGLNLLQEDNPDLIGSEIARWLSTLEISG

SEQ ID NO: 1949 - protein, 277 aa, Synthetic construct
MFHYVDVGPRDGTPVLFLHGNPTSSYVWRNIIPHVAPTHRCIAPDLIGMGKSDKPDLGYFFDDHVRFMDAFIEALGLEEVVLVIHDWGSALGFHWAKRNPERVKGIAFMEFIRPIPTWDEWPEFAREMFQAFRTTDVGRKLIIDQNVFIEGTLPMGVVRPLTEVEMDHYREPFLNPVDREPLWRFPNELPIAGEPANIVALVEEYMDWLHQSPVPKLLFWGTPGVLIPPAEAARLAKSLPNCKAVDIGPGLNLLQEDNPDLIGSEIARWLSTLEISG

SEQ ID NO: 1950 - protein, 277 aa, Synthetic construct
MFHYVDVGPRDGTPVLFLHGNPTSSYVWRNIIPHVAPTHRCIAPDLIGMGKSDKPDLGYFFDDHVRFMDAFIEALGLEEVVLVIHDWGSALGFHWAKRNPERVKGIAFMEFIRPIPTWDEWPEFARETLQAFRTTDVGRKLIIDQNVFIEGTLPMGVVRPLTEVEMDHYREPFLNPVDREPLWRFPNELPIAGEPANIVALVEEYMDWLHQSPVPKLLFWGTPGVLIPPAEAARLAKSLPNCKAVDIGPGLNLLQEDNPDLIGSEIARWLSTLEISG

SEQ ID NO: 1951 - protein, 277 aa, Synthetic construct
MFHYVDVGPRDGTPVLFLHGNPTSSYVWRNIIPHVAPTHRCIAPDLIGMGKSDKPDLGYFFDDHVRFMDAFIEALGLEEVVLVIHDWGSALGFHWAKRNPERVKGIAFMEFIRPIPTWDEWPEFARETYQAFRTTDVGRKLIIDQNVFIEGTLPMGVVRPLTEVEMDHYREPFLNPVDREPLWRFPNELPIAGEPANIVALVEEYMDWLHQSPVPKLLFWGTPGVLIPPAEAARLAKSLPNCKAVDIGPGLNLLQEDNPDLIGSEIARWLSTLEISG

SEQ ID NO: 1952 - protein, 277 aa, Synthetic construct
MFHYVDVGPRDGTPVLFLHGNPTSSYVWRNIIPHVAPTHRCIAPDLIGMGKSDKPDLGYFFDDHVRFMDAFIEALGLEEVVLVIHDWGSALGFHWAKRNPERVKGIAFMEFIRPIPTWDEWPEFARETIQAFRTTDVGRKLIIDQNVFIEGTLPMGVVRPLTEVEMDHYREPFLNPVDREPLWRFPNELPIAGEPANIVALVEEYMDWLHQSPVPKLLFWGTPGVLIPPAEAARLAKSLPNCKAVDIGPGLNLLQEDNPDLIGSEIARWLSTLEISG

SEQ ID NO: 1953 - protein, 277 aa, Synthetic construct
MFHYVDVGPRDGTPVLFLHGNPTSSYVWRNIIPHVAPTHRCIAPDLIGMGKSDKPDLGYFFDDHVRFMDAFIEALGLEEVVLVIHDWGSALGFHWAKRNPERVKGIAFMEFIRPIPTWDEWPEFARETMQAFRTTDVGRKLIIDQNVFIEGTLPMGVVRPLTEVEMDHYREPFLNPVDREPLWRFPNELPIAGEPANIVALVEEYMDWLHQSPVPKLLFWGTPGVLIPPAEAARLAKSLPNCKAVDIGPGLNLLQEDNPDLIGSEIARWLSTLEISG

SEQ ID NO: 1954 - protein, 277 aa, Synthetic construct
MFHYVDVGPRDGTPVLFLHGNPTSSYVWRNIIPHVAPTHRCIAPDLIGMGKSDKPDLGYFFDDHVRFMDAFIEALGLEEVVLVIHDWGSALGFHWAKRNPERVKGIAFMEFIRPIPTWDEWPEFARETVQAFRTTDVGRKLIIDQNVFIEGTLPMGVVRPLTEVEMDHYREPFLNPVDREPLWRFPNELPIAGEPANIVALVEEYMDWLHQSPVPKLLFWGTPGVLIPPAEAARLAKSLPNCKAVDIGPGLNLLQEDNPDLIGSEIARWLSTLEISG

SEQ ID NO: 1955 - protein, 277 aa, Synthetic construct
MFHYVDVGPRDGTPVLFLHGNPTSSYVWRNIIPHVAPTHRCIAPDLIGMGKSDKPDLGYFFDDHVRFMDAFIEALGLEEVVLVIHDWGSALGFHWAKRNPERVKGIAFMEFIRPIPTWDEWPEFARETWQAFRTTDVGRKLIIDQNVFIEGTLPMGVVRPLTEVEMDHYREPFLNPVDREPLWRFPNELPIAGEPANIVALVEEYMDWLHQSPVPKLLFWGTPGVLIPPAEAARLAKSLPNCKAVDIGPGLNLLQEDNPDLIGSEIARWLSTLEISG

SEQ ID NO: 1956 - protein, 277 aa, Synthetic construct
MFHYVDVGPRDGTPVLFLHGNPTSSYVWRNIIPHVAPTHRCIAPDLIGMGKSDKPDLGYFFDDHVRFMDAFIEALGLEEVVLVIHDWGSALGFHWAKRNPERVKGIAFMEFIRPIPTWDEWPEFARETFRAFRTTDVGRKLIIDQNVFIEGTLPMGVVRPLTEVEMDHYREPFLNPVDREPLWRFPNELPIAGEPANIVALVEEYMDWLHQSPVPKLLFWGTPGVLIPPAEAARLAKSLPNCKAVDIGPGLNLLQEDNPDLIGSEIARWLSTLEISG

SEQ ID NO: 1957 - protein, 277 aa, Synthetic construct
MFHYVDVGPRDGTPVLFLHGNPTSSYVWRNIIPHVAPTHRCIAPDLIGMGKSDKPDLGYFFDDHVRFMDAFIEALGLEEVVLVIHDWGSALGFHWAKRNPERVKGIAFMEFIRPIPTWDEWPEFARETFKAFRTTDVGRKLIIDQNVFIEGTLPMGVVRPLTEVEMDHYREPFLNPVDREPLWRFPNELPIAGEPANIVALVEEYMDWLHQSPVPKLLFWGTPGVLIPPAEAARLAKSLPNCKAVDIGPGLNLLQEDNPDLIGSEIARWLSTLEISG

SEQ ID NO: 1958 - protein, 277 aa, Synthetic construct
MFHYVDVGPRDGTPVLFLHGNPTSSYVWRNIIPHVAPTHRCIAPDLIGMGKSDKPDLGYFFDDHVRFMDAFIEALGLEEVVLVIHDWGSALGFHWAKRNPERVKGIAFMEFIRPIPTWDEWPEFARETFAAFRTTDVGRKLIIDQNVFIEGTLPMGVVRPLTEVEMDHYREPFLNPVDREPLWRFPNELPIAGEPANIVALVEEYMDWLHQSPVPKLLFWGTPGVLIPPAEAARLAKSLPNCKAVDIGPGLNLLQEDNPDLIGSEIARWLSTLEISG

SEQ ID NO: 1959 - protein, 277 aa, Synthetic construct
MFHYVDVGPRDGTPVLFLHGNPTSSYVWRNIIPHVAPTHRCIAPDLIGMGKSDKPDLGYFFDDHVRFMDAFIEALGLEEVVLVIHDWGSALGFHWAKRNPERVKGIAFMEFIRPIPTWDEWPEFARETFEAFRTTDVGRKLIIDQNVFIEGTLPMGVVRPLTEVEMDHYREPFLNPVDREPLWRFPNELPIAGEPANIVALVEEYMDWLHQSPVPKLLFWGTPGVLIPPAEAARLAKSLPNCKAVDIGPGLNLLQEDNPDLIGSEIARWLSTLEISG

SEQ ID NO: 1960 - protein, 277 aa, Synthetic construct
MFHYVDVGPRDGTPVLFLHGNPTSSYVWRNIIPHVAPTHRCIAPDLIGMGKSDKPDLGYFFDDHVRFMDAFIEALGLEEVVLVIHDWGSALGFHWAKRNPERVKGIAFMEFIRPIPTWDEWPEFARETFLAFRTTDVGRKLIIDQNVFIEGTLPMGVVRPLTEVEMDHYREPFLNPVDREPLWRFPNELPIAGEPANIVALVEEYMDWLHQSPVPKLLFWGTPGVLIPPAEAARLAKSLPNCKAVDIGPGLNLLQEDNPDLIGSEIARWLSTLEISG

SEQ ID NO: 1961 - protein, 277 aa, Synthetic construct
MFHYVDVGPRDGTPVLFLHGNPTSSYVWRNIIPHVAPTHRCIAPDLIGMGKSDKPDLGYFFDDHVRFMDAFIEALGLEEVVLVIHDWGSALGFHWAKRNPERVKGIAFMEFIRPIPTWDEWPEFARETFTAFRTTDVGRKLIIDQNVFIEGTLPMGVVRPLTEVEMDHYREPFLNPVDREPLWRFPNELPIAGEPANIVALVEEYMDWLHQSPVPKLLFWGTPGVLIPPAEAARLAKSLPNCKAVDIGPGLNLLQEDNPDLIGSEIARWLSTLEISG

SEQ ID NO: 1962 - protein, 277 aa, Synthetic construct
MFHYVDVGPRDGTPVLFLHGNPTSSYVWRNIIPHVAPTHRCIAPDLIGMGKSDKPDLGYFFDDHVRFMDAFIEALGLEEVVLVIHDWGSALGFHWAKRNPERVKGIAFMEFIRPIPTWDEWPEFARETFQRFRTTDVGRKLIIDQNVFIEGTLPMGVVRPLTEVEMDHYREPFLNPVDREPLWRFPNELPIAGEPANIVALVEEYMDWLHQSPVPKLLFWGTPGVLIPPAEAARLAKSLPNCKAVDIGPGLNLLQEDNPDLIGSEIARWLSTLEISG

SEQ ID NO: 1963 - protein, 277 aa, Synthetic construct
MFHYVDVGPRDGTPVLFLHGNPTSSYVWRNIIPHVAPTHRCIAPDLIGMGKSDKPDLGYFFDDHVRFMDAFIEALGLEEVVLVIHDWGSALGFHWAKRNPERVKGIAFMEFIRPIPTWDEWPEFARETFQGFRTTDVGRKLIIDQNVFIEGTLPMGVVRPLTEVEMDHYREPFLNPVDREPLWRFPNELPIAGEPANIVALVEEYMDWLHQSPVPKLLFWGTPGVLIPPAEAARLAKSLPNCKAVDIGPGLNLLQEDNPDLIGSEIARWLSTLEISG

SEQ ID NO: 1964 - protein, 277 aa, Synthetic construct
MFHYVDVGPRDGTPVLFLHGNPTSSYVWRNIIPHVAPTHRCIAPDLIGMGKSDKPDLGYFFDDHVRFMDAFIEALGLEEVVLVIHDWGSALGFHWAKRNPERVKGIAFMEFIRPIPTWDEWPEFARETFQSFRTTDVGRKLIIDQNVFIEGTLPMGVVRPLTEVEMDHYREPFLNPVDREPLWRFPNELPIAGEPANIVALVEEYMDWLHQSPVPKLLFWGTPGVLIPPAEAARLAKSLPNCKAVDIGPGLNLLQEDNPDLIGSEIARWLSTLEISG

SEQ ID NO: 1965 - protein, 277 aa, Synthetic construct
MFHYVDVGPRDGTPVLFLHGNPTSSYVWRNIIPHVAPTHRCIAPDLIGMGKSDKPDLGYFFDDHVRFMDAFIEALGLEEVVLVIHDWGSALGFHWAKRNPERVKGIAFMEFIRPIPTWDEWPEFARETFQKFRTTDVGRKLIIDQNVFIEGTLPMGVVRPLTEVEMDHYREPFLNPVDREPLWRFPNELPIAGEPANIVALVEEYMDWLHQSPVPKLLFWGTPGVLIPPAEAARLAKSLPNCKAVDIGPGLNLLQEDNPDLIGSEIARWLSTLEISG

SEQ ID NO: 1966 - protein, 277 aa, Synthetic construct
MFHYVDVGPRDGTPVLFLHGNPTSSYVWRNIIPHVAPTHRCIAPDLIGMGKSDKPDLGYFFDDHVRFMDAFIEALGLEEVVLVIHDWGSALGFHWAKRNPERVKGIAFMEFIRPIPTWDEWPEFARETFQQFRTTDVGRKLIIDQNVFIEGTLPMGVVRPLTEVEMDHYREPFLNPVDREPLWRFPNELPIAGEPANIVALVEEYMDWLHQSPVPKLLFWGTPGVLIPPAEAARLAKSLPNCKAVDIGPGLNLLQEDNPDLIGSEIARWLSTLEISG

SEQ ID NO: 1967 - protein, 277 aa, Synthetic construct
MFHYVDVGPRDGTPVLFLHGNPTSSYVWRNIIPHVAPTHRCIAPDLIGMGKSDKPDLGYFFDDHVRFMDAFIEALGLEEVVLVIHDWGSALGFHWAKRNPERVKGIAFMEFIRPIPTWDEWPEFARETFQTFRTTDVGRKLIIDQNVFIEGTLPMGVVRPLTEVEMDHYREPFLNPVDREPLWRFPNELPIAGEPANIVALVEEYMDWLHQSPVPKLLFWGTPGVLIPPAEAARLAKSLPNCKAVDIGPGLNLLQEDNPDLIGSEIARWLSTLEISG

SEQ ID NO: 1968 - protein, 277 aa, Synthetic construct
MFHYVDVGPRDGTPVLFLHGNPTSSYVWRNIIPHVAPTHRCIAPDLIGMGKSDKPDLGYFFDDHVRFMDAFIEALGLEEVVLVIHDWGSALGFHWAKRNPERVKGIAFMEFIRPIPTWDEWPEFARETFQALRTTDVGRKLIIDQNVFIEGTLPMGVVRPLTEVEMDHYREPFLNPVDREPLWRFPNELPIAGEPANIVALVEEYMDWLHQSPVPKLLFWGTPGVLIPPAEAARLAKSLPNCKAVDIGPGLNLLQEDNPDLIGSEIARWLSTLEISG

SEQ ID NO: 1969 - protein, 277 aa, Synthetic construct
MFHYVDVGPRDGTPVLFLHGNPTSSYVWRNIIPHVAPTHRCIAPDLIGMGKSDKPDLGYFFDDHVRFMDAFIEALGLEEVVLVIHDWGSALGFHWAKRNPERVKGIAFMEFIRPIPTWDEWPEFARETFQAMRTTDVGRKLIIDQNVFIEGTLPMGVVRPLTEVEMDHYREPFLNPVDREPLWRFPNELPIAGEPANIVALVEEYMDWLHQSPVPKLLFWGTPGVLIPPAEAARLAKSLPNCKAVDIGPGLNLLQEDNPDLIGSEIARWLSTLEISG

SEQ ID NO: 1970 - protein, 277 aa, Synthetic construct
MFHYVDVGPRDGTPVLFLHGNPTSSYVWRNIIPHVAPTHRCIAPDLIGMGKSDKPDLGYFFDDHVRFMDAFIEALGLEEVVLVIHDWGSALGFHWAKRNPERVKGIAFMEFIRPIPTWDEWPEFARETFQAIRTTDVGRKLIIDQNVFIEGTLPMGVVRPLTEVEMDHYREPFLNPVDREPLWRFPNELPIAGEPANIVALVEEYMDWLHQSPVPKLLFWGTPGVLIPPAEAARLAKSLPNCKAVDIGPGLNLLQEDNPDLIGSEIARWLSTLEISG

SEQ ID NO: 1971 - protein, 277 aa, Synthetic construct
MFHYVDVGPRDGTPVLFLHGNPTSSYVWRNIIPHVAPTHRCIAPDLIGMGKSDKPDLGYFFDDHVRFMDAFIEALGLEEVVLVIHDWGSALGFHWAKRNPERVKGIAFMEFIRPIPTWDEWPEFARETFQAYRTTDVGRKLIIDQNVFIEGTLPMGVVRPLTEVEMDHYREPFLNPVDREPLWRFPNELPIAGEPANIVALVEEYMDWLHQSPVPKLLFWGTPGVLIPPAEAARLAKSLPNCKAVDIGPGLNLLQEDNPDLIGSEIARWLSTLEISG

SEQ ID NO: 1972 - protein, 277 aa, Synthetic construct
MFHYVDVGPRDGTPVLFLHGNPTSSYVWRNIIPHVAPTHRCIAPDLIGMGKSDKPDLGYFFDDHVRFMDAFIEALGLEEVVLVIHDWGSALGFHWAKRNPERVKGIAFMEFIRPIPTWDEWPEFARETFQAVRTTDVGRKLIIDQNVFIEGTLPMGVVRPLTEVEMDHYREPFLNPVDREPLWRFPNELPIAGEPANIVALVEEYMDWLHQSPVPKLLFWGTPGVLIPPAEAARLAKSLPNCKAVDIGPGLNLLQEDNPDLIGSEIARWLSTLEISG

SEQ ID NO: 1973 - protein, 277 aa, Synthetic construct
MFHYVDVGPRDGTPVLFLHGNPTSSYVWRNIIPHVAPTHRCIAPDLIGMGKSDKPDLGYFFDDHVRFMDAFIEALGLEEVVLVIHDWGSALGFHWAKRNPERVKGIAFMEFIRPIPTWDEWPEFARETFQAARTTDVGRKLIIDQNVFIEGTLPMGVVRPLTEVEMDHYREPFLNPVDREPLWRFPNELPIAGEPANIVALVEEYMDWLHQSPVPKLLFWGTPGVLIPPAEAARLAKSLPNCKAVDIGPGLNLLQEDNPDLIGSEIARWLSTLEISG

SEQ ID NO: 1974 - protein, 277 aa, Synthetic construct
MFHYVDVGPRDGTPVLFLHGNPTSSYVWRNIIPHVAPTHRCIAPDLIGMGKSDKPDLGYFFDDHVRFMDAFIEALGLEEVVLVIHDWGSALGFHWAKRNPERVKGIAFMEFIRPIPTWDEWPEFARETFQAFKTTDVGRKLIIDQNVFIEGTLPMGVVRPLTEVEMDHYREPFLNPVDREPLWRFPNELPIAGEPANIVALVEEYMDWLHQSPVPKLLFWGTPGVLIPPAEAARLAKSLPNCKAVDIGPGLNLLQEDNPDLIGSEIARWLSTLEISG

SEQ ID NO: 1975 - protein, 277 aa, Synthetic construct
MFHYVDVGPRDGTPVLFLHGNPTSSYVWRNIIPHVAPTHRCIAPDLIGMGKSDKPDLGYFFDDHVRFMDAFIEALGLEEVVLVIHDWGSALGFHWAKRNPERVKGIAFMEFIRPIPTWDEWPEFARETFQAFQTTDVGRKLIIDQNVFIEGTLPMGVVRPLTEVEMDHYREPFLNPVDREPLWRFPNELPIAGEPANIVALVEEYMDWLHQSPVPKLLFWGTPGVLIPPAEAARLAKSLPNCKAVDIGPGLNLLQEDNPDLIGSEIARWLSTLEISG

SEQ ID NO: 1976 - protein, 277 aa, Synthetic construct
MFHYVDVGPRDGTPVLFLHGNPTSSYVWRNIIPHVAPTHRCIAPDLIGMGKSDKPDLGYFFDDHVRFMDAFIEALGLEEVVLVIHDWGSALGFHWAKRNPERVKGIAFMEFIRPIPTWDEWPEFARETFQAFLTTDVGRKLIIDQNVFIEGTLPMGVVRPLTEVEMDHYREPFLNPVDREPLWRFPNELPIAGEPANIVALVEEYMDWLHQSPVPKLLFWGTPGVLIPPAEAARLAKSLPNCKAVDIGPGLNLLQEDNPDLIGSEIARWLSTLEISG

SEQ ID NO: 1977 - protein, 277 aa, Synthetic construct
MFHYVDVGPRDGTPVLFLHGNPTSSYVWRNIIPHVAPTHRCIAPDLIGMGKSDKPDLGYFFDDHVRFMDAFIEALGLEEVVLVIHDWGSALGFHWAKRNPERVKGIAFMEFIRPIPTWDEWPEFARETFQAFATTDVGRKLIIDQNVFIEGTLPMGVVRPLTEVEMDHYREPFLNPVDREPLWRFPNELPIAGEPANIVALVEEYMDWLHQSPVPKLLFWGTPGVLIPPAEAARLAKSLPNCKAVDIGPGLNLLQEDNPDLIGSEIARWLSTLEISG

SEQ ID NO: 1978 - protein, 277 aa, Synthetic construct
MFHYVDVGPRDGTPVLFLHGNPTSSYVWRNIIPHVAPTHRCIAPDLIGMGKSDKPDLGYFFDDHVRFMDAFIEALGLEEVVLVIHDWGSALGFHWAKRNPERVKGIAFMEFIRPIPTWDEWPEFARETFQAFSTTDVGRKLIIDQNVFIEGTLPMGVVRPLTEVEMDHYREPFLNPVDREPLWRFPNELPIAGEPANIVALVEEYMDWLHQSPVPKLLFWGTPGVLIPPAEAARLAKSLPNCKAVDIGPGLNLLQEDNPDLIGSEIARWLSTLEISG

SEQ ID NO: 1979 - protein, 277 aa, Synthetic construct
MFHYVDVGPRDGTPVLFLHGNPTSSYVWRNIIPHVAPTHRCIAPDLIGMGKSDKPDLGYFFDDHVRFMDAFIEALGLEEVVLVIHDWGSALGFHWAKRNPERVKGIAFMEFIRPIPTWDEWPEFARETFQAFHTTDVGRKLIIDQNVFIEGTLPMGVVRPLTEVEMDHYREPFLNPVDREPLWRFPNELPIAGEPANIVALVEEYMDWLHQSPVPKLLFWGTPGVLIPPAEAARLAKSLPNCKAVDIGPGLNLLQEDNPDLIGSEIARWLSTLEISG

SEQ ID NO: 1980 - protein, 277 aa, Synthetic construct
MFHYVDVGPRDGTPVLFLHGNPTSSYVWRNIIPHVAPTHRCIAPDLIGMGKSDKPDLGYFFDDHVRFMDAFIEALGLEEVVLVIHDWGSALGFHWAKRNPERVKGIAFMEFIRPIPTWDEWPEFARETFQAFRSTDVGRKLIIDQNVFIEGTLPMGVVRPLTEVEMDHYREPFLNPVDREPLWRFPNELPIAGEPANIVALVEEYMDWLHQSPVPKLLFWGTPGVLIPPAEAARLAKSLPNCKAVDIGPGLNLLQEDNPDLIGSEIARWLSTLEISG

SEQ ID NO: 1981 - protein, 277 aa, Synthetic construct
MFHYVDVGPRDGTPVLFLHGNPTSSYVWRNIIPHVAPTHRCIAPDLIGMGKSDKPDLGYFFDDHVRFMDAFIEALGLEEVVLVIHDWGSALGFHWAKRNPERVKGIAFMEFIRPIPTWDEWPEFARETFQAFRDTDVGRKLIIDQNVFIEGTLPMGVVRPLTEVEMDHYREPFLNPVDREPLWRFPNELPIAGEPANIVALVEEYMDWLHQSPVPKLLFWGTPGVLIPPAEAARLAKSLPNCKAVDIGPGLNLLQEDNPDLIGSEIARWLSTLEISG

SEQ ID NO: 1982 - protein, 277 aa, Synthetic construct
MFHYVDVGPRDGTPVLFLHGNPTSSYVWRNIIPHVAPTHRCIAPDLIGMGKSDKPDLGYFFDDHVRFMDAFIEALGLEEVVLVIHDWGSALGFHWAKRNPERVKGIAFMEFIRPIPTWDEWPEFARETFQAFRETDVGRKLIIDQNVFIEGTLPMGVVRPLTEVEMDHYREPFLNPVDREPLWRFPNELPIAGEPANIVALVEEYMDWLHQSPVPKLLFWGTPGVLIPPAEAARLAKSLPNCKAVDIGPGLNLLQEDNPDLIGSEIARWLSTLEISG

SEQ ID NO: 1983 - protein, 277 aa, Synthetic construct
MFHYVDVGPRDGTPVLFLHGNPTSSYVWRNIIPHVAPTHRCIAPDLIGMGKSDKPDLGYFFDDHVRFMDAFIEALGLEEVVLVIHDWGSALGFHWAKRNPERVKGIAFMEFIRPIPTWDEWPEFARETFQAFRGTDVGRKLIIDQNVFIEGTLPMGVVRPLTEVEMDHYREPFLNPVDREPLWRFPNELPIAGEPANIVALVEEYMDWLHQSPVPKLLFWGTPGVLIPPAEAARLAKSLPNCKAVDIGPGLNLLQEDNPDLIGSEIARWLSTLEISG

SEQ ID NO: 1984 - protein, 277 aa, Synthetic construct
MFHYVDVGPRDGTPVLFLHGNPTSSYVWRNIIPHVAPTHRCIAPDLIGMGKSDKPDLGYFFDDHVRFMDAFIEALGLEEVVLVIHDWGSALGFHWAKRNPERVKGIAFMEFIRPIPTWDEWPEFARETFQAFRATDVGRKLIIDQNVFIEGTLPMGVVRPLTEVEMDHYREPFLNPVDREPLWRFPNELPIAGEPANIVALVEEYMDWLHQSPVPKLLFWGTPGVLIPPAEAARLAKSLPNCKAVDIGPGLNLLQEDNPDLIGSEIARWLSTLEISG

SEQ ID NO: 1985 - protein, 277 aa, Synthetic construct
MFHYVDVGPRDGTPVLFLHGNPTSSYVWRNIIPHVAPTHRCIAPDLIGMGKSDKPDLGYFFDDHVRFMDAFIEALGLEEVVLVIHDWGSALGFHWAKRNPERVKGIAFMEFIRPIPTWDEWPEFARETFQAFRNTDVGRKLIIDQNVFIEGTLPMGVVRPLTEVEMDHYREPFLNPVDREPLWRFPNELPIAGEPANIVALVEEYMDWLHQSPVPKLLFWGTPGVLIPPAEAARLAKSLPNCKAVDIGPGLNLLQEDNPDLIGSEIARWLSTLEISG

SEQ ID NO: 1986 - protein, 277 aa, Synthetic construct
MFHYVDVGPRDGTPVLFLHGNPTSSYVWRNIIPHVAPTHRCIAPDLIGMGKSDKPDLGYFFDDHVRFMDAFIEALGLEEVVLVIHDWGSALGFHWAKRNPERVKGIAFMEFIRPIPTWDEWPEFARETFQAFRTPDVGRKLIIDQNVFIEGTLPMGVVRPLTEVEMDHYREPFLNPVDREPLWRFPNELPIAGEPANIVALVEEYMDWLHQSPVPKLLFWGTPGVLIPPAEAARLAKSLPNCKAVDIGPGLNLLQEDNPDLIGSEIARWLSTLEISG

SEQ ID NO: 1987 - protein, 277 aa, Synthetic construct
MFHYVDVGPRDGTPVLFLHGNPTSSYVWRNIIPHVAPTHRCIAPDLIGMGKSDKPDLGYFFDDHVRFMDAFIEALGLEEVVLVIHDWGSALGFHWAKRNPERVKGIAFMEFIRPIPTWDEWPEFARETFQAFRTEDVGRKLIIDQNVFIEGTLPMGVVRPLTEVEMDHYREPFLNPVDREPLWRFPNELPIAGEPANIVALVEEYMDWLHQSPVPKLLFWGTPGVLIPPAEAARLAKSLPNCKAVDIGPGLNLLQEDNPDLIGSEIARWLSTLEISG

SEQ ID NO: 1988 - protein, 277 aa, Synthetic construct
MFHYVDVGPRDGTPVLFLHGNPTSSYVWRNIIPHVAPTHRCIAPDLIGMGKSDKPDLGYFFDDHVRFMDAFIEALGLEEVVLVIHDWGSALGFHWAKRNPERVKGIAFMEFIRPIPTWDEWPEFARETFQAFRTADVGRKLIIDQNVFIEGTLPMGVVRPLTEVEMDHYREPFLNPVDREPLWRFPNELPIAGEPANIVALVEEYMDWLHQSPVPKLLFWGTPGVLIPPAEAARLAKSLPNCKAVDIGPGLNLLQEDNPDLIGSEIARWLSTLEISG

SEQ ID NO: 1989 - protein, 277 aa, Synthetic construct
MFHYVDVGPRDGTPVLFLHGNPTSSYVWRNIIPHVAPTHRCIAPDLIGMGKSDKPDLGYFFDDHVRFMDAFIEALGLEEVVLVIHDWGSALGFHWAKRNPERVKGIAFMEFIRPIPTWDEWPEFARETFQAFRTSDVGRKLIIDQNVFIEGTLPMGVVRPLTEVEMDHYREPFLNPVDREPLWRFPNELPIAGEPANIVALVEEYMDWLHQSPVPKLLFWGTPGVLIPPAEAARLAKSLPNCKAVDIGPGLNLLQEDNPDLIGSEIARWLSTLEISG

SEQ ID NO: 1990 - protein, 277 aa, Synthetic construct
MFHYVDVGPRDGTPVLFLHGNPTSSYVWRNIIPHVAPTHRCIAPDLIGMGKSDKPDLGYFFDDHVRFMDAFIEALGLEEVVLVIHDWGSALGFHWAKRNPERVKGIAFMEFIRPIPTWDEWPEFARETFQAFRTDDVGRKLIIDQNVFIEGTLPMGVVRPLTEVEMDHYREPFLNPVDREPLWRFPNELPIAGEPANIVALVEEYMDWLHQSPVPKLLFWGTPGVLIPPAEAARLAKSLPNCKAVDIGPGLNLLQEDNPDLIGSEIARWLSTLEISG

SEQ ID NO: 1991 - protein, 277 aa, Synthetic construct
MFHYVDVGPRDGTPVLFLHGNPTSSYVWRNIIPHVAPTHRCIAPDLIGMGKSDKPDLGYFFDDHVRFMDAFIEALGLEEVVLVIHDWGSALGFHWAKRNPERVKGIAFMEFIRPIPTWDEWPEFARETFQAFRTGDVGRKLIIDQNVFIEGTLPMGVVRPLTEVEMDHYREPFLNPVDREPLWRFPNELPIAGEPANIVALVEEYMDWLHQSPVPKLLFWGTPGVLIPPAEAARLAKSLPNCKAVDIGPGLNLLQEDNPDLIGSEIARWLSTLEISG

SEQ ID NO: 1992 - protein, 277 aa, Synthetic construct
MFHYVDVGPRDGTPVLFLHGNPTSSYVWRNIIPHVAPTHRCIAPDLIGMGKSDKPDLGYFFDDHVRFMDAFIEALGLEEVVLVIHDWGSALGFHWAKRNPERVKGIAFMEFIRPIPTWDEWPEFARETFQAFRTTEVGRKLIIDQNVFIEGTLPMGVVRPLTEVEMDHYREPFLNPVDREPLWRFPNELPIAGEPANIVALVEEYMDWLHQSPVPKLLFWGTPGVLIPPAEAARLAKSLPNCKAVDIGPGLNLLQEDNPDLIGSEIARWLSTLEISG

SEQ ID NO: 1993 - protein, 277 aa, Synthetic construct
MFHYVDVGPRDGTPVLFLHGNPTSSYVWRNIIPHVAPTHRCIAPDLIGMGKSDKPDLGYFFDDHVRFMDAFIEALGLEEVVLVIHDWGSALGFHWAKRNPERVKGIAFMEFIRPIPTWDEWPEFARETFQAFRTTGVGRKLIIDQNVFIEGTLPMGVVRPLTEVEMDHYREPFLNPVDREPLWRFPNELPIAGEPANIVALVEEYMDWLHQSPVPKLLFWGTPGVLIPPAEAARLAKSLPNCKAVDIGPGLNLLQEDNPDLIGSEIARWLSTLEISG

SEQ ID NO: 1994 - protein, 277 aa, Synthetic construct
MFHYVDVGPRDGTPVLFLHGNPTSSYVWRNIIPHVAPTHRCIAPDLIGMGKSDKPDLGYFFDDHVRFMDAFIEALGLEEVVLVIHDWGSALGFHWAKRNPERVKGIAFMEFIRPIPTWDEWPEFARETFQAFRTTPVGRKLIIDQNVFIEGTLPMGVVRPLTEVEMDHYREPFLNPVDREPLWRFPNELPIAGEPANIVALVEEYMDWLHQSPVPKLLFWGTPGVLIPPAEAARLAKSLPNCKAVDIGPGLNLLQEDNPDLIGSEIARWLSTLEISG

SEQ ID NO: 1995 - protein, 277 aa, Synthetic construct
MFHYVDVGPRDGTPVLFLHGNPTSSYVWRNIIPHVAPTHRCIAPDLIGMGKSDKPDLGYFFDDHVRFMDAFIEALGLEEVVLVIHDWGSALGFHWAKRNPERVKGIAFMEFIRPIPTWDEWPEFARETFQAFRTTAVGRKLIIDQNVFIEGTLPMGVVRPLTEVEMDHYREPFLNPVDREPLWRFPNELPIAGEPANIVALVEEYMDWLHQSPVPKLLFWGTPGVLIPPAEAARLAKSLPNCKAVDIGPGLNLLQEDNPDLIGSEIARWLSTLEISG

SEQ ID NO: 1996 - protein, 277 aa, Synthetic construct
MFHYVDVGPRDGTPVLFLHGNPTSSYVWRNIIPHVAPTHRCIAPDLIGMGKSDKPDLGYFFDDHVRFMDAFIEALGLEEVVLVIHDWGSALGFHWAKRNPERVKGIAFMEFIRPIPTWDEWPEFARETFQAFRTTSVGRKLIIDQNVFIEGTLPMGVVRPLTEVEMDHYREPFLNPVDREPLWRFPNELPIAGEPANIVALVEEYMDWLHQSPVPKLLFWGTPGVLIPPAEAARLAKSLPNCKAVDIGPGLNLLQEDNPDLIGSEIARWLSTLEISG

SEQ ID NO: 1997 - protein, 277 aa, Synthetic construct
MFHYVDVGPRDGTPVLFLHGNPTSSYVWRNIIPHVAPTHRCIAPDLIGMGKSDKPDLGYFFDDHVRFMDAFIEALGLEEVVLVIHDWGSALGFHWAKRNPERVKGIAFMEFIRPIPTWDEWPEFARETFQAFRTTKVGRKLIIDQNVFIEGTLPMGVVRPLTEVEMDHYREPFLNPVDREPLWRFPNELPIAGEPANIVALVEEYMDWLHQSPVPKLLFWGTPGVLIPPAEAARLAKSLPNCKAVDIGPGLNLLQEDNPDLIGSEIARWLSTLEISG

SEQ ID NO: 1998 - protein, 277 aa, Synthetic construct
MFHYVDVGPRDGTPVLFLHGNPTSSYVWRNIIPHVAPTHRCIAPDLIGMGKSDKPDLGYFFDDHVRFMDAFIEALGLEEVVLVIHDWGSALGFHWAKRNPERVKGIAFMEFIRPIPTWDEWPEFARETFQAFRTTDAGRKLIIDQNVFIEGTLPMGVVRPLTEVEMDHYREPFLNPVDREPLWRFPNELPIAGEPANIVALVEEYMDWLHQSPVPKLLFWGTPGVLIPPAEAARLAKSLPNCKAVDIGPGLNLLQEDNPDLIGSEIARWLSTLEISG

SEQ ID NO: 1999 - protein, 277 aa, Synthetic construct
MFHYVDVGPRDGTPVLFLHGNPTSSYVWRNIIPHVAPTHRCIAPDLIGMGKSDKPDLGYFFDDHVRFMDAFIEALGLEEVVLVIHDWGSALGFHWAKRNPERVKGIAFMEFIRPIPTWDEWPEFARETFQAFRTTDEGRKLIIDQNVFIEGTLPMGVVRPLTEVEMDHYREPFLNPVDREPLWRFPNELPIAGEPANIVALVEEYMDWLHQSPVPKLLFWGTPGVLIPPAEAARLAKSLPNCKAVDIGPGLNLLQEDNPDLIGSEIARWLSTLEISG

SEQ ID NO: 2000 - protein, 277 aa, Synthetic construct
MFHYVDVGPRDGTPVLFLHGNPTSSYVWRNIIPHVAPTHRCIAPDLIGMGKSDKPDLGYFFDDHVRFMDAFIEALGLEEVVLVIHDWGSALGFHWAKRNPERVKGIAFMEFIRPIPTWDEWPEFARETFQAFRTTDTGRKLIIDQNVFIEGTLPMGVVRPLTEVEMDHYREPFLNPVDREPLWRFPNELPIAGEPANIVALVEEYMDWLHQSPVPKLLFWGTPGVLIPPAEAARLAKSLPNCKAVDIGPGLNLLQEDNPDLIGSEIARWLSTLEISG

SEQ ID NO: 2001 - protein, 277 aa, Synthetic construct
MFHYVDVGPRDGTPVLFLHGNPTSSYVWRNIIPHVAPTHRCIAPDLIGMGKSDKPDLGYFFDDHVRFMDAFIEALGLEEVVLVIHDWGSALGFHWAKRNPERVKGIAFMEFIRPIPTWDEWPEFARETFQAFRTTDIGRKLIIDQNVFIEGTLPMGVVRPLTEVEMDHYREPFLNPVDREPLWRFPNELPIAGEPANIVALVEEYMDWLHQSPVPKLLFWGTPGVLIPPAEAARLAKSLPNCKAVDIGPGLNLLQEDNPDLIGSEIARWLSTLEISG

SEQ ID NO: 2002 - protein, 277 aa, Synthetic construct
MFHYVDVGPRDGTPVLFLHGNPTSSYVWRNIIPHVAPTHRCIAPDLIGMGKSDKPDLGYFFDDHVRFMDAFIEALGLEEVVLVIHDWGSALGFHWAKRNPERVKGIAFMEFIRPIPTWDEWPEFARETFQAFRTTDGGRKLIIDQNVFIEGTLPMGVVRPLTEVEMDHYREPFLNPVDREPLWRFPNELPIAGEPANIVALVEEYMDWLHQSPVPKLLFWGTPGVLIPPAEAARLAKSLPNCKAVDIGPGLNLLQEDNPDLIGSEIARWLSTLEISG

SEQ ID NO: 2003 - protein, 277 aa, Synthetic construct
MFHYVDVGPRDGTPVLFLHGNPTSSYVWRNIIPHVAPTHRCIAPDLIGMGKSDKPDLGYFFDDHVRFMDAFIEALGLEEVVLVIHDWGSALGFHWAKRNPERVKGIAFMEFIRPIPTWDEWPEFARETFQAFRTTDLGRKLIIDQNVFIEGTLPMGVVRPLTEVEMDHYREPFLNPVDREPLWRFPNELPIAGEPANIVALVEEYMDWLHQSPVPKLLFWGTPGVLIPPAEAARLAKSLPNCKAVDIGPGLNLLQEDNPDLIGSEIARWLSTLEISG

SEQ ID NO: 2004 - protein, 277 aa, Synthetic construct
MFHYVDVGPRDGTPVLFLHGNPTSSYVWRNIIPHVAPTHRCIAPDLIGMGKSDKPDLGYFFDDHVRFMDAFIEALGLEEVVLVIHDWGSALGFHWAKRNPERVKGIAFMEFIRPIPTWDEWPEFARETFQAFRTTDVARKLIIDQNVFIEGTLPMGVVRPLTEVEMDHYREPFLNPVDREPLWRFPNELPIAGEPANIVALVEEYMDWLHQSPVPKLLFWGTPGVLIPPAEAARLAKSLPNCKAVDIGPGLNLLQEDNPDLIGSEIARWLSTLEISG

SEQ ID NO: 2005 - protein, 277 aa, Synthetic construct
MFHYVDVGPRDGTPVLFLHGNPTSSYVWRNIIPHVAPTHRCIAPDLIGMGKSDKPDLGYFFDDHVRFMDAFIEALGLEEVVLVIHDWGSALGFHWAKRNPERVKGIAFMEFIRPIPTWDEWPEFARETFQAFRTTDVSRKLIIDQNVFIEGTLPMGVVRPLTEVEMDHYREPFLNPVDREPLWRFPNELPIAGEPANIVALVEEYMDWLHQSPVPKLLFWGTPGVLIPPAEAARLAKSLPNCKAVDIGPGLNLLQEDNPDLIGSEIARWLSTLEISG

SEQ ID NO: 2006 - protein, 277 aa, Synthetic construct
MFHYVDVGPRDGTPVLFLHGNPTSSYVWRNIIPHVAPTHRCIAPDLIGMGKSDKPDLGYFFDDHVRFMDAFIEALGLEEVVLVIHDWGSALGFHWAKRNPERVKGIAFMEFIRPIPTWDEWPEFARETFQAFRTTDVDRKLIIDQNVFIEGTLPMGVVRPLTEVEMDHYREPFLNPVDREPLWRFPNELPIAGEPANIVALVEEYMDWLHQSPVPKLLFWGTPGVLIPPAEAARLAKSLPNCKAVDIGPGLNLLQEDNPDLIGSEIARWLSTLEISG

SEQ ID NO: 2007 - protein, 277 aa, Synthetic construct
MFHYVDVGPRDGTPVLFLHGNPTSSYVWRNIIPHVAPTHRCIAPDLIGMGKSDKPDLGYFFDDHVRFMDAFIEALGLEEVVLVIHDWGSALGFHWAKRNPERVKGIAFMEFIRPIPTWDEWPEFARETFQAFRTTDVERKLIIDQNVFIEGTLPMGVVRPLTEVEMDHYREPFLNPVDREPLWRFPNELPIAGEPANIVALVEEYMDWLHQSPVPKLLFWGTPGVLIPPAEAARLAKSLPNCKAVDIGPGLNLLQEDNPDLIGSEIARWLSTLEISG

SEQ ID NO: 2008 - protein, 277 aa, Synthetic construct
MFHYVDVGPRDGTPVLFLHGNPTSSYVWRNIIPHVAPTHRCIAPDLIGMGKSDKPDLGYFFDDHVRFMDAFIEALGLEEVVLVIHDWGSALGFHWAKRNPERVKGIAFMEFIRPIPTWDEWPEFARETFQAFRTTDVTRKLIIDQNVFIEGTLPMGVVRPLTEVEMDHYREPFLNPVDREPLWRFPNELPIAGEPANIVALVEEYMDWLHQSPVPKLLFWGTPGVLIPPAEAARLAKSLPNCKAVDIGPGLNLLQEDNPDLIGSEIARWLSTLEISG

SEQ ID NO: 2009 - protein, 277 aa, Synthetic construct
MFHYVDVGPRDGTPVLFLHGNPTSSYVWRNIIPHVAPTHRCIAPDLIGMGKSDKPDLGYFFDDHVRFMDAFIEALGLEEVVLVIHDWGSALGFHWAKRNPERVKGIAFMEFIRPIPTWDEWPEFARETFQAFRTTDVNRKLIIDQNVFIEGTLPMGVVRPLTEVEMDHYREPFLNPVDREPLWRFPNELPIAGEPANIVALVEEYMDWLHQSPVPKLLFWGTPGVLIPPAEAARLAKSLPNCKAVDIGPGLNLLQEDNPDLIGSEIARWLSTLEISG

SEQ ID NO: 2010 - protein, 277 aa, Synthetic construct
MFHYVDVGPRDGTPVLFLHGNPTSSYVWRNIIPHVAPTHRCIAPDLIGMGKSDKPDLGYFFDDHVRFMDAFIEALGLEEVVLVIHDWGSALGFHWAKRNPERVKGIAFMEFIRPIPTWDEWPEFARETFQAFRTTDVGEKLIIDQNVFIEGTLPMGVVRPLTEVEMDHYREPFLNPVDREPLWRFPNELPIAGEPANIVALVEEYMDWLHQSPVPKLLFWGTPGVLIPPAEAARLAKSLPNCKAVDIGPGLNLLQEDNPDLIGSEIARWLSTLEISG

SEQ ID NO: 2011 - protein, 277 aa, Synthetic construct
MFHYVDVGPRDGTPVLFLHGNPTSSYVWRNIIPHVAPTHRCIAPDLIGMGKSDKPDLGYFFDDHVRFMDAFIEALGLEEVVLVIHDWGSALGFHWAKRNPERVKGIAFMEFIRPIPTWDEWPEFARETFQAFRTTDVGQKLIIDQNVFIEGTLPMGVVRPLTEVEMDHYREPFLNPVDREPLWRFPNELPIAGEPANIVALVEEYMDWLHQSPVPKLLFWGTPGVLIPPAEAARLAKSLPNCKAVDIGPGLNLLQEDNPDLIGSEIARWLSTLEISG

SEQ ID NO: 2012 - protein, 277 aa, Synthetic construct
MFHYVDVGPRDGTPVLFLHGNPTSSYVWRNIIPHVAPTHRCIAPDLIGMGKSDKPDLGYFFDDHVRFMDAFIEALGLEEVVLVIHDWGSALGFHWAKRNPERVKGIAFMEFIRPIPTWDEWPEFARETFQAFRTTDVGKKLIIDQNVFIEGTLPMGVVRPLTEVEMDHYREPFLNPVDREPLWRFPNELPIAGEPANIVALVEEYMDWLHQSPVPKLLFWGTPGVLIPPAEAARLAKSLPNCKAVDIGPGLNLLQEDNPDLIGSEIARWLSTLEISG

SEQ ID NO: 2013 - protein, 277 aa, Synthetic construct
MFHYVDVGPRDGTPVLFLHGNPTSSYVWRNIIPHVAPTHRCIAPDLIGMGKSDKPDLGYFFDDHVRFMDAFIEALGLEEVVLVIHDWGSALGFHWAKRNPERVKGIAFMEFIRPIPTWDEWPEFARETFQAFRTTDVGAKLIIDQNVFIEGTLPMGVVRPLTEVEMDHYREPFLNPVDREPLWRFPNELPIAGEPANIVALVEEYMDWLHQSPVPKLLFWGTPGVLIPPAEAARLAKSLPNCKAVDIGPGLNLLQEDNPDLIGSEIARWLSTLEISG

SEQ ID NO: 2014 - protein, 277 aa, Synthetic construct
MFHYVDVGPRDGTPVLFLHGNPTSSYVWRNIIPHVAPTHRCIAPDLIGMGKSDKPDLGYFFDDHVRFMDAFIEALGLEEVVLVIHDWGSALGFHWAKRNPERVKGIAFMEFIRPIPTWDEWPEFARETFQAFRTTDVGDKLIIDQNVFIEGTLPMGVVRPLTEVEMDHYREPFLNPVDREPLWRFPNELPIAGEPANIVALVEEYMDWLHQSPVPKLLFWGTPGVLIPPAEAARLAKSLPNCKAVDIGPGLNLLQEDNPDLIGSEIARWLSTLEISG

SEQ ID NO: 2015 - protein, 277 aa, Synthetic construct
MFHYVDVGPRDGTPVLFLHGNPTSSYVWRNIIPHVAPTHRCIAPDLIGMGKSDKPDLGYFFDDHVRFMDAFIEALGLEEVVLVIHDWGSALGFHWAKRNPERVKGIAFMEFIRPIPTWDEWPEFARETFQAFRTTDVGHKLIIDQNVFIEGTLPMGVVRPLTEVEMDHYREPFLNPVDREPLWRFPNELPIAGEPANIVALVEEYMDWLHQSPVPKLLFWGTPGVLIPPAEAARLAKSLPNCKAVDIGPGLNLLQEDNPDLIGSEIARWLSTLEISG

SEQ ID NO: 2016 - protein, 277 aa, Synthetic construct
MFHYVDVGPRDGTPVLFLHGNPTSSYVWRNIIPHVAPTHRCIAPDLIGMGKSDKPDLGYFFDDHVRFMDAFIEALGLEEVVLVIHDWGSALGFHWAKRNPERVKGIAFMEFIRPIPTWDEWPEFARETFQAFRTTDVGRELIIDQNVFIEGTLPMGVVRPLTEVEMDHYREPFLNPVDREPLWRFPNELPIAGEPANIVALVEEYMDWLHQSPVPKLLFWGTPGVLIPPAEAARLAKSLPNCKAVDIGPGLNLLQEDNPDLIGSEIARWLSTLEISG

SEQ ID NO: 2017 - protein, 277 aa, Synthetic construct
MFHYVDVGPRDGTPVLFLHGNPTSSYVWRNIIPHVAPTHRCIAPDLIGMGKSDKPDLGYFFDDHVRFMDAFIEALGLEEVVLVIHDWGSALGFHWAKRNPERVKGIAFMEFIRPIPTWDEWPEFARETFQAFRTTDVGRQLIIDQNVFIEGTLPMGVVRPLTEVEMDHYREPFLNPVDREPLWRFPNELPIAGEPANIVALVEEYMDWLHQSPVPKLLFWGTPGVLIPPAEAARLAKSLPNCKAVDIGPGLNLLQEDNPDLIGSEIARWLSTLEISG

SEQ ID NO: 2018 - protein, 277 aa, Synthetic construct
MFHYVDVGPRDGTPVLFLHGNPTSSYVWRNIIPHVAPTHRCIAPDLIGMGKSDKPDLGYFFDDHVRFMDAFIEALGLEEVVLVIHDWGSALGFHWAKRNPERVKGIAFMEFIRPIPTWDEWPEFARETFQAFRTTDVGRDLIIDQNVFIEGTLPMGVVRPLTEVEMDHYREPFLNPVDREPLWRFPNELPIAGEPANIVALVEEYMDWLHQSPVPKLLFWGTPGVLIPPAEAARLAKSLPNCKAVDIGPGLNLLQEDNPDLIGSEIARWLSTLEISG

SEQ ID NO: 2019 - protein, 277 aa, Synthetic construct
MFHYVDVGPRDGTPVLFLHGNPTSSYVWRNIIPHVAPTHRCIAPDLIGMGKSDKPDLGYFFDDHVRFMDAFIEALGLEEVVLVIHDWGSALGFHWAKRNPERVKGIAFMEFIRPIPTWDEWPEFARETFQAFRTTDVGRRLIIDQNVFIEGTLPMGVVRPLTEVEMDHYREPFLNPVDREPLWRFPNELPIAGEPANIVALVEEYMDWLHQSPVPKLLFWGTPGVLIPPAEAARLAKSLPNCKAVDIGPGLNLLQEDNPDLIGSEIARWLSTLEISG

SEQ ID NO: 2020 - protein, 277 aa, Synthetic construct
MFHYVDVGPRDGTPVLFLHGNPTSSYVWRNIIPHVAPTHRCIAPDLIGMGKSDKPDLGYFFDDHVRFMDAFIEALGLEEVVLVIHDWGSALGFHWAKRNPERVKGIAFMEFIRPIPTWDEWPEFARETFQAFRTTDVGRALIIDQNVFIEGTLPMGVVRPLTEVEMDHYREPFLNPVDREPLWRFPNELPIAGEPANIVALVEEYMDWLHQSPVPKLLFWGTPGVLIPPAEAARLAKSLPNCKAVDIGPGLNLLQEDNPDLIGSEIARWLSTLEISG

SEQ ID NO: 2021 - protein, 277 aa, Synthetic construct
MFHYVDVGPRDGTPVLFLHGNPTSSYVWRNIIPHVAPTHRCIAPDLIGMGKSDKPDLGYFFDDHVRFMDAFIEALGLEEVVLVIHDWGSALGFHWAKRNPERVKGIAFMEFIRPIPTWDEWPEFARETFQAFRTTDVGRSLIIDQNVFIEGTLPMGVVRPLTEVEMDHYREPFLNPVDREPLWRFPNELPIAGEPANIVALVEEYMDWLHQSPVPKLLFWGTPGVLIPPAEAARLAKSLPNCKAVDIGPGLNLLQEDNPDLIGSEIARWLSTLEISG

SEQ ID NO: 2022 - protein, 277 aa, Synthetic construct
MFHYVDVGPRDGTPVLFLHGNPTSSYVWRNIIPHVAPTHRCIAPDLIGMGKSDKPDLGYFFDDHVRFMDAFIEALGLEEVVLVIHDWGSALGFHWAKRNPERVKGIAFMEFIRPIPTWDEWPEFARETFQAFRTTDVGRKMIIDQNVFIEGTLPMGVVRPLTEVEMDHYREPFLNPVDREPLWRFPNELPIAGEPANIVALVEEYMDWLHQSPVPKLLFWGTPGVLIPPAEAARLAKSLPNCKAVDIGPGLNLLQEDNPDLIGSEIARWLSTLEISG

SEQ ID NO: 2023 - protein, 277 aa, Synthetic construct
MFHYVDVGPRDGTPVLFLHGNPTSSYVWRNIIPHVAPTHRCIAPDLIGMGKSDKPDLGYFFDDHVRFMDAFIEALGLEEVVLVIHDWGSALGFHWAKRNPERVKGIAFMEFIRPIPTWDEWPEFARETFQAFRTTDVGRKAIIDQNVFIEGTLPMGVVRPLTEVEMDHYREPFLNPVDREPLWRFPNELPIAGEPANIVALVEEYMDWLHQSPVPKLLFWGTPGVLIPPAEAARLAKSLPNCKAVDIGPGLNLLQEDNPDLIGSEIARWLSTLEISG

SEQ ID NO: 2024 - protein, 277 aa, Synthetic construct
MFHYVDVGPRDGTPVLFLHGNPTSSYVWRNIIPHVAPTHRCIAPDLIGMGKSDKPDLGYFFDDHVRFMDAFIEALGLEEVVLVIHDWGSALGFHWAKRNPERVKGIAFMEFIRPIPTWDEWPEFARETFQAFRTTDVGRKIIIDQNVFIEGTLPMGVVRPLTEVEMDHYREPFLNPVDREPLWRFPNELPIAGEPANIVALVEEYMDWLHQSPVPKLLFWGTPGVLIPPAEAARLAKSLPNCKAVDIGPGLNLLQEDNPDLIGSEIARWLSTLEISG

SEQ ID NO: 2025 - protein, 277 aa, Synthetic construct
MFHYVDVGPRDGTPVLFLHGNPTSSYVWRNIIPHVAPTHRCIAPDLIGMGKSDKPDLGYFFDDHVRFMDAFIEALGLEEVVLVIHDWGSALGFHWAKRNPERVKGIAFMEFIRPIPTWDEWPEFARETFQAFRTTDVGRKVIIDQNVFIEGTLPMGVVRPLTEVEMDHYREPFLNPVDREPLWRFPNELPIAGEPANIVALVEEYMDWLHQSPVPKLLFWGTPGVLIPPAEAARLAKSLPNCKAVDIGPGLNLLQEDNPDLIGSEIARWLSTLEISG

SEQ ID NO: 2026 - protein, 277 aa, Synthetic construct
MFHYVDVGPRDGTPVLFLHGNPTSSYVWRNIIPHVAPTHRCIAPDLIGMGKSDKPDLGYFFDDHVRFMDAFIEALGLEEVVLVIHDWGSALGFHWAKRNPERVKGIAFMEFIRPIPTWDEWPEFARETFQAFRTTDVGRKQIIDQNVFIEGTLPMGVVRPLTEVEMDHYREPFLNPVDREPLWRFPNELPIAGEPANIVALVEEYMDWLHQSPVPKLLFWGTPGVLIPPAEAARLAKSLPNCKAVDIGPGLNLLQEDNPDLIGSEIARWLSTLEISG

SEQ ID NO: 2027 - protein, 277 aa, Synthetic construct
MFHYVDVGPRDGTPVLFLHGNPTSSYVWRNIIPHVAPTHRCIAPDLIGMGKSDKPDLGYFFDDHVRFMDAFIEALGLEEVVLVIHDWGSALGFHWAKRNPERVKGIAFMEFIRPIPTWDEWPEFARETFQAFRTTDVGRKTIIDQNVFIEGTLPMGVVRPLTEVEMDHYREPFLNPVDREPLWRFPNELPIAGEPANIVALVEEYMDWLHQSPVPKLLFWGTPGVLIPPAEAARLAKSLPNCKAVDIGPGLNLLQEDNPDLIGSEIARWLSTLEISG

SEQ ID NO: 2028 - protein, 277 aa, Synthetic construct
MFHYVDVGPRDGTPVLFLHGNPTSSYVWRNIIPHVAPTHRCIAPDLIGMGKSDKPDLGYFFDDHVRFMDAFIEALGLEEVVLVIHDWGSALGFHWAKRNPERVKGIAFMEFIRPIPTWDEWPEFARETFQAFRTTDVGRKLVIDQNVFIEGTLPMGVVRPLTEVEMDHYREPFLNPVDREPLWRFPNELPIAGEPANIVALVEEYMDWLHQSPVPKLLFWGTPGVLIPPAEAARLAKSLPNCKAVDIGPGLNLLQEDNPDLIGSEIARWLSTLEISG

SEQ ID NO: 2029 - protein, 277 aa, Synthetic construct
MFHYVDVGPRDGTPVLFLHGNPTSSYVWRNIIPHVAPTHRCIAPDLIGMGKSDKPDLGYFFDDHVRFMDAFIEALGLEEVVLVIHDWGSALGFHWAKRNPERVKGIAFMEFIRPIPTWDEWPEFARETFQAFRTTDVGRKLLIDQNVFIEGTLPMGVVRPLTEVEMDHYREPFLNPVDREPLWRFPNELPIAGEPANIVALVEEYMDWLHQSPVPKLLFWGTPGVLIPPAEAARLAKSLPNCKAVDIGPGLNLLQEDNPDLIGSEIARWLSTLEISG

SEQ ID NO: 2030 - protein, 277 aa, Synthetic construct
MFHYVDVGPRDGTPVLFLHGNPTSSYVWRNIIPHVAPTHRCIAPDLIGMGKSDKPDLGYFFDDHVRFMDAFIEALGLEEVVLVIHDWGSALGFHWAKRNPERVKGIAFMEFIRPIPTWDEWPEFARETFQAFRTTDVGRKLAIDQNVFIEGTLPMGVVRPLTEVEMDHYREPFLNPVDREPLWRFPNELPIAGEPANIVALVEEYMDWLHQSPVPKLLFWGTPGVLIPPAEAARLAKSLPNCKAVDIGPGLNLLQEDNPDLIGSEIARWLSTLEISG

SEQ ID NO: 2031 - protein, 277 aa, Synthetic construct
MFHYVDVGPRDGTPVLFLHGNPTSSYVWRNIIPHVAPTHRCIAPDLIGMGKSDKPDLGYFFDDHVRFMDAFIEALGLEEVVLVIHDWGSALGFHWAKRNPERVKGIAFMEFIRPIPTWDEWPEFARETFQAFRTTDVGRKLMIDQNVFIEGTLPMGVVRPLTEVEMDHYREPFLNPVDREPLWRFPNELPIAGEPANIVALVEEYMDWLHQSPVPKLLFWGTPGVLIPPAEAARLAKSLPNCKAVDIGPGLNLLQEDNPDLIGSEIARWLSTLEISG

SEQ ID NO: 2032 - protein, 277 aa, Synthetic construct
MFHYVDVGPRDGTPVLFLHGNPTSSYVWRNIIPHVAPTHRCIAPDLIGMGKSDKPDLGYFFDDHVRFMDAFIEALGLEEVVLVIHDWGSALGFHWAKRNPERVKGIAFMEFIRPIPTWDEWPEFARETFQAFRTTDVGRKLTIDQNVFIEGTLPMGVVRPLTEVEMDHYREPFLNPVDREPLWRFPNELPIAGEPANIVALVEEYMDWLHQSPVPKLLFWGTPGVLIPPAEAARLAKSLPNCKAVDIGPGLNLLQEDNPDLIGSEIARWLSTLEISG

SEQ ID NO: 2033 - protein, 277 aa, Synthetic construct
MFHYVDVGPRDGTPVLFLHGNPTSSYVWRNIIPHVAPTHRCIAPDLIGMGKSDKPDLGYFFDDHVRFMDAFIEALGLEEVVLVIHDWGSALGFHWAKRNPERVKGIAFMEFIRPIPTWDEWPEFARETFQAFRTTDVGRKLFIDQNVFIEGTLPMGVVRPLTEVEMDHYREPFLNPVDREPLWRFPNELPIAGEPANIVALVEEYMDWLHQSPVPKLLFWGTPGVLIPPAEAARLAKSLPNCKAVDIGPGLNLLQEDNPDLIGSEIARWLSTLEISG

SEQ ID NO: 2034 - protein, 277 aa, Synthetic construct
MFHYVDVGPRDGTPVLFLHGNPTSSYVWRNIIPHVAPTHRCIAPDLIGMGKSDKPDLGYFFDDHVRFMDAFIEALGLEEVVLVIHDWGSALGFHWAKRNPERVKGIAFMEFIRPIPTWDEWPEFARETFQAFRTTDVGRKLILDQNVFIEGTLPMGVVRPLTEVEMDHYREPFLNPVDREPLWRFPNELPIAGEPANIVALVEEYMDWLHQSPVPKLLFWGTPGVLIPPAEAARLAKSLPNCKAVDIGPGLNLLQEDNPDLIGSEIARWLSTLEISG

SEQ ID NO: 2035 - protein, 277 aa, Synthetic construct
MFHYVDVGPRDGTPVLFLHGNPTSSYVWRNIIPHVAPTHRCIAPDLIGMGKSDKPDLGYFFDDHVRFMDAFIEALGLEEVVLVIHDWGSALGFHWAKRNPERVKGIAFMEFIRPIPTWDEWPEFARETFQAFRTTDVGRKLIMDQNVFIEGTLPMGVVRPLTEVEMDHYREPFLNPVDREPLWRFPNELPIAGEPANIVALVEEYMDWLHQSPVPKLLFWGTPGVLIPPAEAARLAKSLPNCKAVDIGPGLNLLQEDNPDLIGSEIARWLSTLEISG

SEQ ID NO: 2036 - protein, 277 aa, Synthetic construct
MFHYVDVGPRDGTPVLFLHGNPTSSYVWRNIIPHVAPTHRCIAPDLIGMGKSDKPDLGYFFDDHVRFMDAFIEALGLEEVVLVIHDWGSALGFHWAKRNPERVKGIAFMEFIRPIPTWDEWPEFARETFQAFRTTDVGRKLIVDQNVFIEGTLPMGVVRPLTEVEMDHYREPFLNPVDREPLWRFPNELPIAGEPANIVALVEEYMDWLHQSPVPKLLFWGTPGVLIPPAEAARLAKSLPNCKAVDIGPGLNLLQEDNPDLIGSEIARWLSTLEISG

SEQ ID NO: 2037 - protein, 277 aa, Synthetic construct
MFHYVDVGPRDGTPVLFLHGNPTSSYVWRNIIPHVAPTHRCIAPDLIGMGKSDKPDLGYFFDDHVRFMDAFIEALGLEEVVLVIHDWGSALGFHWAKRNPERVKGIAFMEFIRPIPTWDEWPEFARETFQAFRTTDVGRKLIFDQNVFIEGTLPMGVVRPLTEVEMDHYREPFLNPVDREPLWRFPNELPIAGEPANIVALVEEYMDWLHQSPVPKLLFWGTPGVLIPPAEAARLAKSLPNCKAVDIGPGLNLLQEDNPDLIGSEIARWLSTLEISG

SEQ ID NO: 2038 - protein, 277 aa, Synthetic construct
MFHYVDVGPRDGTPVLFLHGNPTSSYVWRNIIPHVAPTHRCIAPDLIGMGKSDKPDLGYFFDDHVRFMDAFIEALGLEEVVLVIHDWGSALGFHWAKRNPERVKGIAFMEFIRPIPTWDEWPEFARETFQAFRTTDVGRKLITDQNVFIEGTLPMGVVRPLTEVEMDHYREPFLNPVDREPLWRFPNELPIAGEPANIVALVEEYMDWLHQSPVPKLLFWGTPGVLIPPAEAARLAKSLPNCKAVDIGPGLNLLQEDNPDLIGSEIARWLSTLEISG

SEQ ID NO: 2039 - protein, 277 aa, Synthetic construct
MFHYVDVGPRDGTPVLFLHGNPTSSYVWRNIIPHVAPTHRCIAPDLIGMGKSDKPDLGYFFDDHVRFMDAFIEALGLEEVVLVIHDWGSALGFHWAKRNPERVKGIAFMEFIRPIPTWDEWPEFARETFQAFRTTDVGRKLIADQNVFIEGTLPMGVVRPLTEVEMDHYREPFLNPVDREPLWRFPNELPIAGEPANIVALVEEYMDWLHQSPVPKLLFWGTPGVLIPPAEAARLAKSLPNCKAVDIGPGLNLLQEDNPDLIGSEIARWLSTLEISG

SEQ ID NO: 2040 - protein, 277 aa, Synthetic construct
MFHYVDVGPRDGTPVLFLHGNPTSSYVWRNIIPHVAPTHRCIAPDLIGMGKSDKPDLGYFFDDHVRFMDAFIEALGLEEVVLVIHDWGSALGFHWAKRNPERVKGIAFMEFIRPIPTWDEWPEFARETFQAFRTTDVGRKLIIEQNVFIEGTLPMGVVRPLTEVEMDHYREPFLNPVDREPLWRFPNELPIAGEPANIVALVEEYMDWLHQSPVPKLLFWGTPGVLIPPAEAARLAKSLPNCKAVDIGPGLNLLQEDNPDLIGSEIARWLSTLEISG

SEQ ID NO: 2041 - protein, 277 aa, Synthetic construct
MFHYVDVGPRDGTPVLFLHGNPTSSYVWRNIIPHVAPTHRCIAPDLIGMGKSDKPDLGYFFDDHVRFMDAFIEALGLEEVVLVIHDWGSALGFHWAKRNPERVKGIAFMEFIRPIPTWDEWPEFARETFQAFRTTDVGRKLIIQQNVFIEGTLPMGVVRPLTEVEMDHYREPFLNPVDREPLWRFPNELPIAGEPANIVALVEEYMDWLHQSPVPKLLFWGTPGVLIPPAEAARLAKSLPNCKAVDIGPGLNLLQEDNPDLIGSEIARWLSTLEISG

SEQ ID NO: 2042 - protein, 277 aa, Synthetic construct
MFHYVDVGPRDGTPVLFLHGNPTSSYVWRNIIPHVAPTHRCIAPDLIGMGKSDKPDLGYFFDDHVRFMDAFIEALGLEEVVLVIHDWGSALGFHWAKRNPERVKGIAFMEFIRPIPTWDEWPEFARETFQAFRTTDVGRKLIINQNVFIEGTLPMGVVRPLTEVEMDHYREPFLNPVDREPLWRFPNELPIAGEPANIVALVEEYMDWLHQSPVPKLLFWGTPGVLIPPAEAARLAKSLPNCKAVDIGPGLNLLQEDNPDLIGSEIARWLSTLEISG

SEQ ID NO: 2043 - protein, 277 aa, Synthetic construct
MFHYVDVGPRDGTPVLFLHGNPTSSYVWRNIIPHVAPTHRCIAPDLIGMGKSDKPDLGYFFDDHVRFMDAFIEALGLEEVVLVIHDWGSALGFHWAKRNPERVKGIAFMEFIRPIPTWDEWPEFARETFQAFRTTDVGRKLIIGQNVFIEGTLPMGVVRPLTEVEMDHYREPFLNPVDREPLWRFPNELPIAGEPANIVALVEEYMDWLHQSPVPKLLFWGTPGVLIPPAEAARLAKSLPNCKAVDIGPGLNLLQEDNPDLIGSEIARWLSTLEISG

SEQ ID NO: 2044 - protein, 277 aa, Synthetic construct
MFHYVDVGPRDGTPVLFLHGNPTSSYVWRNIIPHVAPTHRCIAPDLIGMGKSDKPDLGYFFDDHVRFMDAFIEALGLEEVVLVIHDWGSALGFHWAKRNPERVKGIAFMEFIRPIPTWDEWPEFARETFQAFRTTDVGRKLIIKQNVFIEGTLPMGVVRPLTEVEMDHYREPFLNPVDREPLWRFPNELPIAGEPANIVALVEEYMDWLHQSPVPKLLFWGTPGVLIPPAEAARLAKSLPNCKAVDIGPGLNLLQEDNPDLIGSEIARWLSTLEISG

SEQ ID NO: 2045 - protein, 277 aa, Synthetic construct
MFHYVDVGPRDGTPVLFLHGNPTSSYVWRNIIPHVAPTHRCIAPDLIGMGKSDKPDLGYFFDDHVRFMDAFIEALGLEEVVLVIHDWGSALGFHWAKRNPERVKGIAFMEFIRPIPTWDEWPEFARETFQAFRTTDVGRKLIISQNVFIEGTLPMGVVRPLTEVEMDHYREPFLNPVDREPLWRFPNELPIAGEPANIVALVEEYMDWLHQSPVPKLLFWGTPGVLIPPAEAARLAKSLPNCKAVDIGPGLNLLQEDNPDLIGSEIARWLSTLEISG

SEQ ID NO: 2046 - protein, 277 aa, Synthetic construct
MFHYVDVGPRDGTPVLFLHGNPTSSYVWRNIIPHVAPTHRCIAPDLIGMGKSDKPDLGYFFDDHVRFMDAFIEALGLEEVVLVIHDWGSALGFHWAKRNPERVKGIAFMEFIRPIPTWDEWPEFARETFQAFRTTDVGRKLIIDKNVFIEGTLPMGVVRPLTEVEMDHYREPFLNPVDREPLWRFPNELPIAGEPANIVALVEEYMDWLHQSPVPKLLFWGTPGVLIPPAEAARLAKSLPNCKAVDIGPGLNLLQEDNPDLIGSEIARWLSTLEISG

SEQ ID NO: 2047 - protein, 277 aa, Synthetic construct
MFHYVDVGPRDGTPVLFLHGNPTSSYVWRNIIPHVAPTHRCIAPDLIGMGKSDKPDLGYFFDDHVRFMDAFIEALGLEEVVLVIHDWGSALGFHWAKRNPERVKGIAFMEFIRPIPTWDEWPEFARETFQAFRTTDVGRKLIIDRNVFIEGTLPMGVVRPLTEVEMDHYREPFLNPVDREPLWRFPNELPIAGEPANIVALVEEYMDWLHQSPVPKLLFWGTPGVLIPPAEAARLAKSLPNCKAVDIGPGLNLLQEDNPDLIGSEIARWLSTLEISG

SEQ ID NO: 2048 - protein, 277 aa, Synthetic construct
MFHYVDVGPRDGTPVLFLHGNPTSSYVWRNIIPHVAPTHRCIAPDLIGMGKSDKPDLGYFFDDHVRFMDAFIEALGLEEVVLVIHDWGSALGFHWAKRNPERVKGIAFMEFIRPIPTWDEWPEFARETFQAFRTTDVGRKLIIDENVFIEGTLPMGVVRPLTEVEMDHYREPFLNPVDREPLWRFPNELPIAGEPANIVALVEEYMDWLHQSPVPKLLFWGTPGVLIPPAEAARLAKSLPNCKAVDIGPGLNLLQEDNPDLIGSEIARWLSTLEISG

SEQ ID NO: 2049 - protein, 277 aa, Synthetic construct
MFHYVDVGPRDGTPVLFLHGNPTSSYVWRNIIPHVAPTHRCIAPDLIGMGKSDKPDLGYFFDDHVRFMDAFIEALGLEEVVLVIHDWGSALGFHWAKRNPERVKGIAFMEFIRPIPTWDEWPEFARETFQAFRTTDVGRKLIIDDNVFIEGTLPMGVVRPLTEVEMDHYREPFLNPVDREPLWRFPNELPIAGEPANIVALVEEYMDWLHQSPVPKLLFWGTPGVLIPPAEAARLAKSLPNCKAVDIGPGLNLLQEDNPDLIGSEIARWLSTLEISG

SEQ ID NO: 2050 - protein, 277 aa, Synthetic construct
MFHYVDVGPRDGTPVLFLHGNPTSSYVWRNIIPHVAPTHRCIAPDLIGMGKSDKPDLGYFFDDHVRFMDAFIEALGLEEVVLVIHDWGSALGFHWAKRNPERVKGIAFMEFIRPIPTWDEWPEFARETFQAFRTTDVGRKLIIDNNVFIEGTLPMGVVRPLTEVEMDHYREPFLNPVDREPLWRFPNELPIAGEPANIVALVEEYMDWLHQSPVPKLLFWGTPGVLIPPAEAARLAKSLPNCKAVDIGPGLNLLQEDNPDLIGSEIARWLSTLEISG

SEQ ID NO: 2051 - protein, 277 aa, Synthetic construct
MFHYVDVGPRDGTPVLFLHGNPTSSYVWRNIIPHVAPTHRCIAPDLIGMGKSDKPDLGYFFDDHVRFMDAFIEALGLEEVVLVIHDWGSALGFHWAKRNPERVKGIAFMEFIRPIPTWDEWPEFARETFQAFRTTDVGRKLIIDANVFIEGTLPMGVVRPLTEVEMDHYREPFLNPVDREPLWRFPNELPIAGEPANIVALVEEYMDWLHQSPVPKLLFWGTPGVLIPPAEAARLAKSLPNCKAVDIGPGLNLLQEDNPDLIGSEIARWLSTLEISG

SEQ ID NO: 2052 - protein, 277 aa, Synthetic construct
MFHYVDVGPRDGTPVLFLHGNPTSSYVWRNIIPHVAPTHRCIAPDLIGMGKSDKPDLGYFFDDHVRFMDAFIEALGLEEVVLVIHDWGSALGFHWAKRNPERVKGIAFMEFIRPIPTWDEWPEFARETFQAFRTTDVGRKLIIDQSVFIEGTLPMGVVRPLTEVEMDHYREPFLNPVDREPLWRFPNELPIAGEPANIVALVEEYMDWLHQSPVPKLLFWGTPGVLIPPAEAARLAKSLPNCKAVDIGPGLNLLQEDNPDLIGSEIARWLSTLEISG

SEQ ID NO: 2053 - protein, 277 aa, Synthetic construct
MFHYVDVGPRDGTPVLFLHGNPTSSYVWRNIIPHVAPTHRCIAPDLIGMGKSDKPDLGYFFDDHVRFMDAFIEALGLEEVVLVIHDWGSALGFHWAKRNPERVKGIAFMEFIRPIPTWDEWPEFARETFQAFRTTDVGRKLIIDQHVFIEGTLPMGVVRPLTEVEMDHYREPFLNPVDREPLWRFPNELPIAGEPANIVALVEEYMDWLHQSPVPKLLFWGTPGVLIPPAEAARLAKSLPNCKAVDIGPGLNLLQEDNPDLIGSEIARWLSTLEISG

SEQ ID NO: 2054 - protein, 277 aa, Synthetic construct
MFHYVDVGPRDGTPVLFLHGNPTSSYVWRNIIPHVAPTHRCIAPDLIGMGKSDKPDLGYFFDDHVRFMDAFIEALGLEEVVLVIHDWGSALGFHWAKRNPERVKGIAFMEFIRPIPTWDEWPEFARETFQAFRTTDVGRKLIIDQTVFIEGTLPMGVVRPLTEVEMDHYREPFLNPVDREPLWRFPNELPIAGEPANIVALVEEYMDWLHQSPVPKLLFWGTPGVLIPPAEAARLAKSLPNCKAVDIGPGLNLLQEDNPDLIGSEIARWLSTLEISG

SEQ ID NO: 2055 - protein, 277 aa, Synthetic construct
MFHYVDVGPRDGTPVLFLHGNPTSSYVWRNIIPHVAPTHRCIAPDLIGMGKSDKPDLGYFFDDHVRFMDAFIEALGLEEVVLVIHDWGSALGFHWAKRNPERVKGIAFMEFIRPIPTWDEWPEFARETFQAFRTTDVGRKLIIDQDVFIEGTLPMGVVRPLTEVEMDHYREPFLNPVDREPLWRFPNELPIAGEPANIVALVEEYMDWLHQSPVPKLLFWGTPGVLIPPAEAARLAKSLPNCKAVDIGPGLNLLQEDNPDLIGSEIARWLSTLEISG

SEQ ID NO: 2056 - protein, 277 aa, Synthetic construct
MFHYVDVGPRDGTPVLFLHGNPTSSYVWRNIIPHVAPTHRCIAPDLIGMGKSDKPDLGYFFDDHVRFMDAFIEALGLEEVVLVIHDWGSALGFHWAKRNPERVKGIAFMEFIRPIPTWDEWPEFARETFQAFRTTDVGRKLIIDQGVFIEGTLPMGVVRPLTEVEMDHYREPFLNPVDREPLWRFPNELPIAGEPANIVALVEEYMDWLHQSPVPKLLFWGTPGVLIPPAEAARLAKSLPNCKAVDIGPGLNLLQEDNPDLIGSEIARWLSTLEISG

SEQ ID NO: 2057 - protein, 277 aa, Synthetic construct
MFHYVDVGPRDGTPVLFLHGNPTSSYVWRNIIPHVAPTHRCIAPDLIGMGKSDKPDLGYFFDDHVRFMDAFIEALGLEEVVLVIHDWGSALGFHWAKRNPERVKGIAFMEFIRPIPTWDEWPEFARETFQAFRTTDVGRKLIIDQKVFIEGTLPMGVVRPLTEVEMDHYREPFLNPVDREPLWRFPNELPIAGEPANIVALVEEYMDWLHQSPVPKLLFWGTPGVLIPPAEAARLAKSLPNCKAVDIGPGLNLLQEDNPDLIGSEIARWLSTLEISG

SEQ ID NO: 2058 - protein, 277 aa, Synthetic construct
MFHYVDVGPRDGTPVLFLHGNPTSSYVWRNIIPHVAPTHRCIAPDLIGMGKSDKPDLGYFFDDHVRFMDAFIEALGLEEVVLVIHDWGSALGFHWAKRNPERVKGIAFMEFIRPIPTWDEWPEFARETFQAFRTTDVGRKLIIDQNLFIEGTLPMGVVRPLTEVEMDHYREPFLNPVDREPLWRFPNELPIAGEPANIVALVEEYMDWLHQSPVPKLLFWGTPGVLIPPAEAARLAKSLPNCKAVDIGPGLNLLQEDNPDLIGSEIARWLSTLEISG

SEQ ID NO: 2059 - protein, 277 aa, Synthetic construct
MFHYVDVGPRDGTPVLFLHGNPTSSYVWRNIIPHVAPTHRCIAPDLIGMGKSDKPDLGYFFDDHVRFMDAFIEALGLEEVVLVIHDWGSALGFHWAKRNPERVKGIAFMEFIRPIPTWDEWPEFARETFQAFRTTDVGRKLIIDQNIFIEGTLPMGVVRPLTEVEMDHYREPFLNPVDREPLWRFPNELPIAGEPANIVALVEEYMDWLHQSPVPKLLFWGTPGVLIPPAEAARLAKSLPNCKAVDIGPGLNLLQEDNPDLIGSEIARWLSTLEISG

SEQ ID NO: 2060 - protein, 277 aa, Synthetic construct
MFHYVDVGPRDGTPVLFLHGNPTSSYVWRNIIPHVAPTHRCIAPDLIGMGKSDKPDLGYFFDDHVRFMDAFIEALGLEEVVLVIHDWGSALGFHWAKRNPERVKGIAFMEFIRPIPTWDEWPEFARETFQAFRTTDVGRKLIIDQNFFIEGTLPMGVVRPLTEVEMDHYREPFLNPVDREPLWRFPNELPIAGEPANIVALVEEYMDWLHQSPVPKLLFWGTPGVLIPPAEAARLAKSLPNCKAVDIGPGLNLLQEDNPDLIGSEIARWLSTLEISG

SEQ ID NO: 2061 - protein, 277 aa, Synthetic construct
MFHYVDVGPRDGTPVLFLHGNPTSSYVWRNIIPHVAPTHRCIAPDLIGMGKSDKPDLGYFFDDHVRFMDAFIEALGLEEVVLVIHDWGSALGFHWAKRNPERVKGIAFMEFIRPIPTWDEWPEFARETFQAFRTTDVGRKLIIDQNAFIEGTLPMGVVRPLTEVEMDHYREPFLNPVDREPLWRFPNELPIAGEPANIVALVEEYMDWLHQSPVPKLLFWGTPGVLIPPAEAARLAKSLPNCKAVDIGPGLNLLQEDNPDLIGSEIARWLSTLEISG

SEQ ID NO: 2062 - protein, 277 aa, Synthetic construct
MFHYVDVGPRDGTPVLFLHGNPTSSYVWRNIIPHVAPTHRCIAPDLIGMGKSDKPDLGYFFDDHVRFMDAFIEALGLEEVVLVIHDWGSALGFHWAKRNPERVKGIAFMEFIRPIPTWDEWPEFARETFQAFRTTDVGRKLIIDQNMFIEGTLPMGVVRPLTEVEMDHYREPFLNPVDREPLWRFPNELPIAGEPANIVALVEEYMDWLHQSPVPKLLFWGTPGVLIPPAEAARLAKSLPNCKAVDIGPGLNLLQEDNPDLIGSEIARWLSTLEISG

SEQ ID NO: 2063 - protein, 277 aa, Synthetic construct
MFHYVDVGPRDGTPVLFLHGNPTSSYVWRNIIPHVAPTHRCIAPDLIGMGKSDKPDLGYFFDDHVRFMDAFIEALGLEEVVLVIHDWGSALGFHWAKRNPERVKGIAFMEFIRPIPTWDEWPEFARETFQAFRTTDVGRKLIIDQNTFIEGTLPMGVVRPLTEVEMDHYREPFLNPVDREPLWRFPNELPIAGEPANIVALVEEYMDWLHQSPVPKLLFWGTPGVLIPPAEAARLAKSLPNCKAVDIGPGLNLLQEDNPDLIGSEIARWLSTLEISG

SEQ ID NO: 2064 - protein, 277 aa, Synthetic construct
MFHYVDVGPRDGTPVLFLHGNPTSSYVWRNIIPHVAPTHRCIAPDLIGMGKSDKPDLGYFFDDHVRFMDAFIEALGLEEVVLVIHDWGSALGFHWAKRNPERVKGIAFMEFIRPIPTWDEWPEFARETFQAFRTTDVGRKLIIDQNVLIEGTLPMGVVRPLTEVEMDHYREPFLNPVDREPLWRFPNELPIAGEPANIVALVEEYMDWLHQSPVPKLLFWGTPGVLIPPAEAARLAKSLPNCKAVDIGPGLNLLQEDNPDLIGSEIARWLSTLEISG

SEQ ID NO: 2065 - protein, 277 aa, Synthetic construct
MFHYVDVGPRDGTPVLFLHGNPTSSYVWRNIIPHVAPTHRCIAPDLIGMGKSDKPDLGYFFDDHVRFMDAFIEALGLEEVVLVIHDWGSALGFHWAKRNPERVKGIAFMEFIRPIPTWDEWPEFARETFQAFRTTDVGRKLIIDQNVYIEGTLPMGVVRPLTEVEMDHYREPFLNPVDREPLWRFPNELPIAGEPANIVALVEEYMDWLHQSPVPKLLFWGTPGVLIPPAEAARLAKSLPNCKAVDIGPGLNLLQEDNPDLIGSEIARWLSTLEISG

SEQ ID NO: 2066 - protein, 277 aa, Synthetic construct
MFHYVDVGPRDGTPVLFLHGNPTSSYVWRNIIPHVAPTHRCIAPDLIGMGKSDKPDLGYFFDDHVRFMDAFIEALGLEEVVLVIHDWGSALGFHWAKRNPERVKGIAFMEFIRPIPTWDEWPEFARETFQAFRTTDVGRKLIIDQNVMIEGTLPMGVVRPLTEVEMDHYREPFLNPVDREPLWRFPNELPIAGEPANIVALVEEYMDWLHQSPVPKLLFWGTPGVLIPPAEAARLAKSLPNCKAVDIGPGLNLLQEDNPDLIGSEIARWLSTLEISG

SEQ ID NO: 2067 - protein, 277 aa, Synthetic construct
MFHYVDVGPRDGTPVLFLHGNPTSSYVWRNIIPHVAPTHRCIAPDLIGMGKSDKPDLGYFFDDHVRFMDAFIEALGLEEVVLVIHDWGSALGFHWAKRNPERVKGIAFMEFIRPIPTWDEWPEFARETFQAFRTTDVGRKLIIDQNVIIEGTLPMGVVRPLTEVEMDHYREPFLNPVDREPLWRFPNELPIAGEPANIVALVEEYMDWLHQSPVPKLLFWGTPGVLIPPAEAARLAKSLPNCKAVDIGPGLNLLQEDNPDLIGSEIARWLSTLEISG

SEQ ID NO: 2068 - protein, 277 aa, Synthetic construct
MFHYVDVGPRDGTPVLFLHGNPTSSYVWRNIIPHVAPTHRCIAPDLIGMGKSDKPDLGYFFDDHVRFMDAFIEALGLEEVVLVIHDWGSALGFHWAKRNPERVKGIAFMEFIRPIPTWDEWPEFARETFQAFRTTDVGRKLIIDQNVVIEGTLPMGVVRPLTEVEMDHYREPFLNPVDREPLWRFPNELPIAGEPANIVALVEEYMDWLHQSPVPKLLFWGTPGVLIPPAEAARLAKSLPNCKAVDIGPGLNLLQEDNPDLIGSEIARWLSTLEISG

SEQ ID NO: 2069 - protein, 277 aa, Synthetic construct
MFHYVDVGPRDGTPVLFLHGNPTSSYVWRNIIPHVAPTHRCIAPDLIGMGKSDKPDLGYFFDDHVRFMDAFIEALGLEEVVLVIHDWGSALGFHWAKRNPERVKGIAFMEFIRPIPTWDEWPEFARETFQAFRTTDVGRKLIIDQNVWIEGTLPMGVVRPLTEVEMDHYREPFLNPVDREPLWRFPNELPIAGEPANIVALVEEYMDWLHQSPVPKLLFWGTPGVLIPPAEAARLAKSLPNCKAVDIGPGLNLLQEDNPDLIGSEIARWLSTLEISG

SEQ ID NO: 2070 - protein, 277 aa, Synthetic construct
MFHYVDVGPRDGTPVLFLHGNPTSSYVWRNIIPHVAPTHRCIAPDLIGMGKSDKPDLGYFFDDHVRFMDAFIEALGLEEVVLVIHDWGSALGFHWAKRNPERVKGIAFMEFIRPIPTWDEWPEFARETFQAFRTTDVGRKLIIDQNVFVEGTLPMGVVRPLTEVEMDHYREPFLNPVDREPLWRFPNELPIAGEPANIVALVEEYMDWLHQSPVPKLLFWGTPGVLIPPAEAARLAKSLPNCKAVDIGPGLNLLQEDNPDLIGSEIARWLSTLEISG

SEQ ID NO: 2071 - protein, 277 aa, Synthetic construct
MFHYVDVGPRDGTPVLFLHGNPTSSYVWRNIIPHVAPTHRCIAPDLIGMGKSDKPDLGYFFDDHVRFMDAFIEALGLEEVVLVIHDWGSALGFHWAKRNPERVKGIAFMEFIRPIPTWDEWPEFARETFQAFRTTDVGRKLIIDQNVFLEGTLPMGVVRPLTEVEMDHYREPFLNPVDREPLWRFPNELPIAGEPANIVALVEEYMDWLHQSPVPKLLFWGTPGVLIPPAEAARLAKSLPNCKAVDIGPGLNLLQEDNPDLIGSEIARWLSTLEISG

SEQ ID NO: 2072 - protein, 277 aa, Synthetic construct
MFHYVDVGPRDGTPVLFLHGNPTSSYVWRNIIPHVAPTHRCIAPDLIGMGKSDKPDLGYFFDDHVRFMDAFIEALGLEEVVLVIHDWGSALGFHWAKRNPERVKGIAFMEFIRPIPTWDEWPEFARETFQAFRTTDVGRKLIIDQNVFMEGTLPMGVVRPLTEVEMDHYREPFLNPVDREPLWRFPNELPIAGEPANIVALVEEYMDWLHQSPVPKLLFWGTPGVLIPPAEAARLAKSLPNCKAVDIGPGLNLLQEDNPDLIGSEIARWLSTLEISG

SEQ ID NO: 2073 - protein, 277 aa, Synthetic construct
MFHYVDVGPRDGTPVLFLHGNPTSSYVWRNIIPHVAPTHRCIAPDLIGMGKSDKPDLGYFFDDHVRFMDAFIEALGLEEVVLVIHDWGSALGFHWAKRNPERVKGIAFMEFIRPIPTWDEWPEFARETFQAFRTTDVGRKLIIDQNVFAEGTLPMGVVRPLTEVEMDHYREPFLNPVDREPLWRFPNELPIAGEPANIVALVEEYMDWLHQSPVPKLLFWGTPGVLIPPAEAARLAKSLPNCKAVDIGPGLNLLQEDNPDLIGSEIARWLSTLEISG

SEQ ID NO: 2074 - protein, 277 aa, Synthetic construct
MFHYVDVGPRDGTPVLFLHGNPTSSYVWRNIIPHVAPTHRCIAPDLIGMGKSDKPDLGYFFDDHVRFMDAFIEALGLEEVVLVIHDWGSALGFHWAKRNPERVKGIAFMEFIRPIPTWDEWPEFARETFQAFRTTDVGRKLIIDQNVFTEGTLPMGVVRPLTEVEMDHYREPFLNPVDREPLWRFPNELPIAGEPANIVALVEEYMDWLHQSPVPKLLFWGTPGVLIPPAEAARLAKSLPNCKAVDIGPGLNLLQEDNPDLIGSEIARWLSTLEISG

SEQ ID NO: 2075 - protein, 277 aa, Synthetic construct
MFHYVDVGPRDGTPVLFLHGNPTSSYVWRNIIPHVAPTHRCIAPDLIGMGKSDKPDLGYFFDDHVRFMDAFIEALGLEEVVLVIHDWGSALGFHWAKRNPERVKGIAFMEFIRPIPTWDEWPEFARETFQAFRTTDVGRKLIIDQNVFFEGTLPMGVVRPLTEVEMDHYREPFLNPVDREPLWRFPNELPIAGEPANIVALVEEYMDWLHQSPVPKLLFWGTPGVLIPPAEAARLAKSLPNCKAVDIGPGLNLLQEDNPDLIGSEIARWLSTLEISG

SEQ ID NO: 2076 - protein, 277 aa, Synthetic construct
MFHYVDVGPRDGTPVLFLHGNPTSSYVWRNIIPHVAPTHRCIAPDLIGMGKSDKPDLGYFFDDHVRFMDAFIEALGLEEVVLVIHDWGSALGFHWAKRNPERVKGIAFMEFIRPIPTWDEWPEFARETFQAFRTTDVGRKLIIDQNVFIDGTLPMGVVRPLTEVEMDHYREPFLNPVDREPLWRFPNELPIAGEPANIVALVEEYMDWLHQSPVPKLLFWGTPGVLIPPAEAARLAKSLPNCKAVDIGPGLNLLQEDNPDLIGSEIARWLSTLEISG

SEQ ID NO: 2077 - protein, 277 aa, Synthetic construct
MFHYVDVGPRDGTPVLFLHGNPTSSYVWRNIIPHVAPTHRCIAPDLIGMGKSDKPDLGYFFDDHVRFMDAFIEALGLEEVVLVIHDWGSALGFHWAKRNPERVKGIAFMEFIRPIPTWDEWPEFARETFQAFRTTDVGRKLIIDQNVFIQGTLPMGVVRPLTEVEMDHYREPFLNPVDREPLWRFPNELPIAGEPANIVALVEEYMDWLHQSPVPKLLFWGTPGVLIPPAEAARLAKSLPNCKAVDIGPGLNLLQEDNPDLIGSEIARWLSTLEISG

SEQ ID NO: 2078 - protein, 277 aa, Synthetic construct
MFHYVDVGPRDGTPVLFLHGNPTSSYVWRNIIPHVAPTHRCIAPDLIGMGKSDKPDLGYFFDDHVRFMDAFIEALGLEEVVLVIHDWGSALGFHWAKRNPERVKGIAFMEFIRPIPTWDEWPEFARETFQAFRTTDVGRKLIIDQNVFIAGTLPMGVVRPLTEVEMDHYREPFLNPVDREPLWRFPNELPIAGEPANIVALVEEYMDWLHQSPVPKLLFWGTPGVLIPPAEAARLAKSLPNCKAVDIGPGLNLLQEDNPDLIGSEIARWLSTLEISG

SEQ ID NO: 2079 - protein, 277 aa, Synthetic construct
MFHYVDVGPRDGTPVLFLHGNPTSSYVWRNIIPHVAPTHRCIAPDLIGMGKSDKPDLGYFFDDHVRFMDAFIEALGLEEVVLVIHDWGSALGFHWAKRNPERVKGIAFMEFIRPIPTWDEWPEFARETFQAFRTTDVGRKLIIDQNVFIGGTLPMGVVRPLTEVEMDHYREPFLNPVDREPLWRFPNELPIAGEPANIVALVEEYMDWLHQSPVPKLLFWGTPGVLIPPAEAARLAKSLPNCKAVDIGPGLNLLQEDNPDLIGSEIARWLSTLEISG

SEQ ID NO: 2080 - protein, 277 aa, Synthetic construct
MFHYVDVGPRDGTPVLFLHGNPTSSYVWRNIIPHVAPTHRCIAPDLIGMGKSDKPDLGYFFDDHVRFMDAFIEALGLEEVVLVIHDWGSALGFHWAKRNPERVKGIAFMEFIRPIPTWDEWPEFARETFQAFRTTDVGRKLIIDQNVFISGTLPMGVVRPLTEVEMDHYREPFLNPVDREPLWRFPNELPIAGEPANIVALVEEYMDWLHQSPVPKLLFWGTPGVLIPPAEAARLAKSLPNCKAVDIGPGLNLLQEDNPDLIGSEIARWLSTLEISG

SEQ ID NO: 2081 - protein, 277 aa, Synthetic construct
MFHYVDVGPRDGTPVLFLHGNPTSSYVWRNIIPHVAPTHRCIAPDLIGMGKSDKPDLGYFFDDHVRFMDAFIEALGLEEVVLVIHDWGSALGFHWAKRNPERVKGIAFMEFIRPIPTWDEWPEFARETFQAFRTTDVGRKLIIDQNVFIKGTLPMGVVRPLTEVEMDHYREPFLNPVDREPLWRFPNELPIAGEPANIVALVEEYMDWLHQSPVPKLLFWGTPGVLIPPAEAARLAKSLPNCKAVDIGPGLNLLQEDNPDLIGSEIARWLSTLEISG

SEQ ID NO: 2082 - protein, 277 aa, Synthetic construct
MFHYVDVGPRDGTPVLFLHGNPTSSYVWRNIIPHVAPTHRCIAPDLIGMGKSDKPDLGYFFDDHVRFMDAFIEALGLEEVVLVIHDWGSALGFHWAKRNPERVKGIAFMEFIRPIPTWDEWPEFARETFQAFRTTDVGRKLIIDQNVFIERTLPMGVVRPLTEVEMDHYREPFLNPVDREPLWRFPNELPIAGEPANIVALVEEYMDWLHQSPVPKLLFWGTPGVLIPPAEAARLAKSLPNCKAVDIGPGLNLLQEDNPDLIGSEIARWLSTLEISG

SEQ ID NO: 2083 - protein, 277 aa, Synthetic construct
MFHYVDVGPRDGTPVLFLHGNPTSSYVWRNIIPHVAPTHRCIAPDLIGMGKSDKPDLGYFFDDHVRFMDAFIEALGLEEVVLVIHDWGSALGFHWAKRNPERVKGIAFMEFIRPIPTWDEWPEFARETFQAFRTTDVGRKLIIDQNVFIEKTLPMGVVRPLTEVEMDHYREPFLNPVDREPLWRFPNELPIAGEPANIVALVEEYMDWLHQSPVPKLLFWGTPGVLIPPAEAARLAKSLPNCKAVDIGPGLNLLQEDNPDLIGSEIARWLSTLEISG

SEQ ID NO: 2084 - protein, 277 aa, Synthetic construct
MFHYVDVGPRDGTPVLFLHGNPTSSYVWRNIIPHVAPTHRCIAPDLIGMGKSDKPDLGYFFDDHVRFMDAFIEALGLEEVVLVIHDWGSALGFHWAKRNPERVKGIAFMEFIRPIPTWDEWPEFARETFQAFRTTDVGRKLIIDQNVFIEQTLPMGVVRPLTEVEMDHYREPFLNPVDREPLWRFPNELPIAGEPANIVALVEEYMDWLHQSPVPKLLFWGTPGVLIPPAEAARLAKSLPNCKAVDIGPGLNLLQEDNPDLIGSEIARWLSTLEISG

SEQ ID NO: 2085 - protein, 277 aa, Synthetic construct
MFHYVDVGPRDGTPVLFLHGNPTSSYVWRNIIPHVAPTHRCIAPDLIGMGKSDKPDLGYFFDDHVRFMDAFIEALGLEEVVLVIHDWGSALGFHWAKRNPERVKGIAFMEFIRPIPTWDEWPEFARETFQAFRTTDVGRKLIIDQNVFIEATLPMGVVRPLTEVEMDHYREPFLNPVDREPLWRFPNELPIAGEPANIVALVEEYMDWLHQSPVPKLLFWGTPGVLIPPAEAARLAKSLPNCKAVDIGPGLNLLQEDNPDLIGSEIARWLSTLEISG

SEQ ID NO: 2086 - protein, 277 aa, Synthetic construct
MFHYVDVGPRDGTPVLFLHGNPTSSYVWRNIIPHVAPTHRCIAPDLIGMGKSDKPDLGYFFDDHVRFMDAFIEALGLEEVVLVIHDWGSALGFHWAKRNPERVKGIAFMEFIRPIPTWDEWPEFARETFQAFRTTDVGRKLIIDQNVFIETTLPMGVVRPLTEVEMDHYREPFLNPVDREPLWRFPNELPIAGEPANIVALVEEYMDWLHQSPVPKLLFWGTPGVLIPPAEAARLAKSLPNCKAVDIGPGLNLLQEDNPDLIGSEIARWLSTLEISG

SEQ ID NO: 2087 - protein, 277 aa, Synthetic construct
MFHYVDVGPRDGTPVLFLHGNPTSSYVWRNIIPHVAPTHRCIAPDLIGMGKSDKPDLGYFFDDHVRFMDAFIEALGLEEVVLVIHDWGSALGFHWAKRNPERVKGIAFMEFIRPIPTWDEWPEFARETFQAFRTTDVGRKLIIDQNVFIESTLPMGVVRPLTEVEMDHYREPFLNPVDREPLWRFPNELPIAGEPANIVALVEEYMDWLHQSPVPKLLFWGTPGVLIPPAEAARLAKSLPNCKAVDIGPGLNLLQEDNPDLIGSEIARWLSTLEISG

SEQ ID NO: 2088 - protein, 277 aa, Synthetic construct
MFHYVDVGPRDGTPVLFLHGNPTSSYVWRNIIPHVAPTHRCIAPDLIGMGKSDKPDLGYFFDDHVRFMDAFIEALGLEEVVLVIHDWGSALGFHWAKRNPERVKGIAFMEFIRPIPTWDEWPEFARETFQAFRTTDVGRKLIIDQNVFIEGVLPMGVVRPLTEVEMDHYREPFLNPVDREPLWRFPNELPIAGEPANIVALVEEYMDWLHQSPVPKLLFWGTPGVLIPPAEAARLAKSLPNCKAVDIGPGLNLLQEDNPDLIGSEIARWLSTLEISG

SEQ ID NO: 2089 - protein, 277 aa, Synthetic construct
MFHYVDVGPRDGTPVLFLHGNPTSSYVWRNIIPHVAPTHRCIAPDLIGMGKSDKPDLGYFFDDHVRFMDAFIEALGLEEVVLVIHDWGSALGFHWAKRNPERVKGIAFMEFIRPIPTWDEWPEFARETFQAFRTTDVGRKLIIDQNVFIEGILPMGVVRPLTEVEMDHYREPFLNPVDREPLWRFPNELPIAGEPANIVALVEEYMDWLHQSPVPKLLFWGTPGVLIPPAEAARLAKSLPNCKAVDIGPGLNLLQEDNPDLIGSEIARWLSTLEISG

SEQ ID NO: 2090 - protein, 277 aa, Synthetic construct
MFHYVDVGPRDGTPVLFLHGNPTSSYVWRNIIPHVAPTHRCIAPDLIGMGKSDKPDLGYFFDDHVRFMDAFIEALGLEEVVLVIHDWGSALGFHWAKRNPERVKGIAFMEFIRPIPTWDEWPEFARETFQAFRTTDVGRKLIIDQNVFIEGALPMGVVRPLTEVEMDHYREPFLNPVDREPLWRFPNELPIAGEPANIVALVEEYMDWLHQSPVPKLLFWGTPGVLIPPAEAARLAKSLPNCKAVDIGPGLNLLQEDNPDLIGSEIARWLSTLEISG

SEQ ID NO: 2091 - protein, 277 aa, Synthetic construct
MFHYVDVGPRDGTPVLFLHGNPTSSYVWRNIIPHVAPTHRCIAPDLIGMGKSDKPDLGYFFDDHVRFMDAFIEALGLEEVVLVIHDWGSALGFHWAKRNPERVKGIAFMEFIRPIPTWDEWPEFARETFQAFRTTDVGRKLIIDQNVFIEGLLPMGVVRPLTEVEMDHYREPFLNPVDREPLWRFPNELPIAGEPANIVALVEEYMDWLHQSPVPKLLFWGTPGVLIPPAEAARLAKSLPNCKAVDIGPGLNLLQEDNPDLIGSEIARWLSTLEISG

SEQ ID NO: 2092 - protein, 277 aa, Synthetic construct
MFHYVDVGPRDGTPVLFLHGNPTSSYVWRNIIPHVAPTHRCIAPDLIGMGKSDKPDLGYFFDDHVRFMDAFIEALGLEEVVLVIHDWGSALGFHWAKRNPERVKGIAFMEFIRPIPTWDEWPEFARETFQAFRTTDVGRKLIIDQNVFIEGMLPMGVVRPLTEVEMDHYREPFLNPVDREPLWRFPNELPIAGEPANIVALVEEYMDWLHQSPVPKLLFWGTPGVLIPPAEAARLAKSLPNCKAVDIGPGLNLLQEDNPDLIGSEIARWLSTLEISG

SEQ ID NO: 2093 - protein, 277 aa, Synthetic construct
MFHYVDVGPRDGTPVLFLHGNPTSSYVWRNIIPHVAPTHRCIAPDLIGMGKSDKPDLGYFFDDHVRFMDAFIEALGLEEVVLVIHDWGSALGFHWAKRNPERVKGIAFMEFIRPIPTWDEWPEFARETFQAFRTTDVGRKLIIDQNVFIEGFLPMGVVRPLTEVEMDHYREPFLNPVDREPLWRFPNELPIAGEPANIVALVEEYMDWLHQSPVPKLLFWGTPGVLIPPAEAARLAKSLPNCKAVDIGPGLNLLQEDNPDLIGSEIARWLSTLEISG

SEQ ID NO: 2094 - protein, 277 aa, Synthetic construct
MFHYVDVGPRDGTPVLFLHGNPTSSYVWRNIIPHVAPTHRCIAPDLIGMGKSDKPDLGYFFDDHVRFMDAFIEALGLEEVVLVIHDWGSALGFHWAKRNPERVKGIAFMEFIRPIPTWDEWPEFARETFQAFRTTDVGRKLIIDQNVFIEGTIPMGVVRPLTEVEMDHYREPFLNPVDREPLWRFPNELPIAGEPANIVALVEEYMDWLHQSPVPKLLFWGTPGVLIPPAEAARLAKSLPNCKAVDIGPGLNLLQEDNPDLIGSEIARWLSTLEISG

SEQ ID NO: 2095 - protein, 277 aa, Synthetic construct
MFHYVDVGPRDGTPVLFLHGNPTSSYVWRNIIPHVAPTHRCIAPDLIGMGKSDKPDLGYFFDDHVRFMDAFIEALGLEEVVLVIHDWGSALGFHWAKRNPERVKGIAFMEFIRPIPTWDEWPEFARETFQAFRTTDVGRKLIIDQNVFIEGTMPMGVVRPLTEVEMDHYREPFLNPVDREPLWRFPNELPIAGEPANIVALVEEYMDWLHQSPVPKLLFWGTPGVLIPPAEAARLAKSLPNCKAVDIGPGLNLLQEDNPDLIGSEIARWLSTLEISG

SEQ ID NO: 2096 - protein, 277 aa, Synthetic construct
MFHYVDVGPRDGTPVLFLHGNPTSSYVWRNIIPHVAPTHRCIAPDLIGMGKSDKPDLGYFFDDHVRFMDAFIEALGLEEVVLVIHDWGSALGFHWAKRNPERVKGIAFMEFIRPIPTWDEWPEFARETFQAFRTTDVGRKLIIDQNVFIEGTFPMGVVRPLTEVEMDHYREPFLNPVDREPLWRFPNELPIAGEPANIVALVEEYMDWLHQSPVPKLLFWGTPGVLIPPAEAARLAKSLPNCKAVDIGPGLNLLQEDNPDLIGSEIARWLSTLEISG

SEQ ID NO: 2097 - protein, 277 aa, Synthetic construct
MFHYVDVGPRDGTPVLFLHGNPTSSYVWRNIIPHVAPTHRCIAPDLIGMGKSDKPDLGYFFDDHVRFMDAFIEALGLEEVVLVIHDWGSALGFHWAKRNPERVKGIAFMEFIRPIPTWDEWPEFARETFQAFRTTDVGRKLIIDQNVFIEGTVPMGVVRPLTEVEMDHYREPFLNPVDREPLWRFPNELPIAGEPANIVALVEEYMDWLHQSPVPKLLFWGTPGVLIPPAEAARLAKSLPNCKAVDIGPGLNLLQEDNPDLIGSEIARWLSTLEISG

SEQ ID NO: 2098 - protein, 277 aa, Synthetic construct
MFHYVDVGPRDGTPVLFLHGNPTSSYVWRNIIPHVAPTHRCIAPDLIGMGKSDKPDLGYFFDDHVRFMDAFIEALGLEEVVLVIHDWGSALGFHWAKRNPERVKGIAFMEFIRPIPTWDEWPEFARETFQAFRTTDVGRKLIIDQNVFIEGTAPMGVVRPLTEVEMDHYREPFLNPVDREPLWRFPNELPIAGEPANIVALVEEYMDWLHQSPVPKLLFWGTPGVLIPPAEAARLAKSLPNCKAVDIGPGLNLLQEDNPDLIGSEIARWLSTLEISG

SEQ ID NO: 2099 - protein, 277 aa, Synthetic construct
MFHYVDVGPRDGTPVLFLHGNPTSSYVWRNIIPHVAPTHRCIAPDLIGMGKSDKPDLGYFFDDHVRFMDAFIEALGLEEVVLVIHDWGSALGFHWAKRNPERVKGIAFMEFIRPIPTWDEWPEFARETFQAFRTTDVGRKLIIDQNVFIEGTYPMGVVRPLTEVEMDHYREPFLNPVDREPLWRFPNELPIAGEPANIVALVEEYMDWLHQSPVPKLLFWGTPGVLIPPAEAARLAKSLPNCKAVDIGPGLNLLQEDNPDLIGSEIARWLSTLEISG

SEQ ID NO: 2100 - protein, 277 aa, Synthetic construct
MFHYVDVGPRDGTPVLFLHGNPTSSYVWRNIIPHVAPTHRCIAPDLIGMGKSDKPDLGYFFDDHVRFMDAFIEALGLEEVVLVIHDWGSALGFHWAKRNPERVKGIAFMEFIRPIPTWDEWPEFARETFQAFRTTDVGRKLIIDQNVFIEGTLRMGVVRPLTEVEMDHYREPFLNPVDREPLWRFPNELPIAGEPANIVALVEEYMDWLHQSPVPKLLFWGTPGVLIPPAEAARLAKSLPNCKAVDIGPGLNLLQEDNPDLIGSEIARWLSTLEISG

SEQ ID NO: 2101 - protein, 277 aa, Synthetic construct
MFHYVDVGPRDGTPVLFLHGNPTSSYVWRNIIPHVAPTHRCIAPDLIGMGKSDKPDLGYFFDDHVRFMDAFIEALGLEEVVLVIHDWGSALGFHWAKRNPERVKGIAFMEFIRPIPTWDEWPEFARETFQAFRTTDVGRKLIIDQNVFIEGTLAMGVVRPLTEVEMDHYREPFLNPVDREPLWRFPNELPIAGEPANIVALVEEYMDWLHQSPVPKLLFWGTPGVLIPPAEAARLAKSLPNCKAVDIGPGLNLLQEDNPDLIGSEIARWLSTLEISG

SEQ ID NO: 2102 - protein, 277 aa, Synthetic construct
MFHYVDVGPRDGTPVLFLHGNPTSSYVWRNIIPHVAPTHRCIAPDLIGMGKSDKPDLGYFFDDHVRFMDAFIEALGLEEVVLVIHDWGSALGFHWAKRNPERVKGIAFMEFIRPIPTWDEWPEFARETFQAFRTTDVGRKLIIDQNVFIEGTLKMGVVRPLTEVEMDHYREPFLNPVDREPLWRFPNELPIAGEPANIVALVEEYMDWLHQSPVPKLLFWGTPGVLIPPAEAARLAKSLPNCKAVDIGPGLNLLQEDNPDLIGSEIARWLSTLEISG

SEQ ID NO: 2103 - protein, 277 aa, Synthetic construct
MFHYVDVGPRDGTPVLFLHGNPTSSYVWRNIIPHVAPTHRCIAPDLIGMGKSDKPDLGYFFDDHVRFMDAFIEALGLEEVVLVIHDWGSALGFHWAKRNPERVKGIAFMEFIRPIPTWDEWPEFARETFQAFRTTDVGRKLIIDQNVFIEGTLSMGVVRPLTEVEMDHYREPFLNPVDREPLWRFPNELPIAGEPANIVALVEEYMDWLHQSPVPKLLFWGTPGVLIPPAEAARLAKSLPNCKAVDIGPGLNLLQEDNPDLIGSEIARWLSTLEISG

SEQ ID NO: 2104 - protein, 277 aa, Synthetic construct
MFHYVDVGPRDGTPVLFLHGNPTSSYVWRNIIPHVAPTHRCIAPDLIGMGKSDKPDLGYFFDDHVRFMDAFIEALGLEEVVLVIHDWGSALGFHWAKRNPERVKGIAFMEFIRPIPTWDEWPEFARETFQAFRTTDVGRKLIIDQNVFIEGTLTMGVVRPLTEVEMDHYREPFLNPVDREPLWRFPNELPIAGEPANIVALVEEYMDWLHQSPVPKLLFWGTPGVLIPPAEAARLAKSLPNCKAVDIGPGLNLLQEDNPDLIGSEIARWLSTLEISG

SEQ ID NO: 2105 - protein, 277 aa, Synthetic construct
MFHYVDVGPRDGTPVLFLHGNPTSSYVWRNIIPHVAPTHRCIAPDLIGMGKSDKPDLGYFFDDHVRFMDAFIEALGLEEVVLVIHDWGSALGFHWAKRNPERVKGIAFMEFIRPIPTWDEWPEFARETFQAFRTTDVGRKLIIDQNVFIEGTLQMGVVRPLTEVEMDHYREPFLNPVDREPLWRFPNELPIAGEPANIVALVEEYMDWLHQSPVPKLLFWGTPGVLIPPAEAARLAKSLPNCKAVDIGPGLNLLQEDNPDLIGSEIARWLSTLEISG

SEQ ID NO: 2106 - protein, 277 aa, Synthetic construct
MFHYVDVGPRDGTPVLFLHGNPTSSYVWRNIIPHVAPTHRCIAPDLIGMGKSDKPDLGYFFDDHVRFMDAFIEALGLEEVVLVIHDWGSALGFHWAKRNPERVKGIAFMEFIRPIPTWDEWPEFARETFQAFRTTDVGRKLIIDQNVFIEGTLPGGVVRPLTEVEMDHYREPFLNPVDREPLWRFPNELPIAGEPANIVALVEEYMDWLHQSPVPKLLFWGTPGVLIPPAEAARLAKSLPNCKAVDIGPGLNLLQEDNPDLIGSEIARWLSTLEISG

SEQ ID NO: 2107 - protein, 277 aa, Synthetic construct
MFHYVDVGPRDGTPVLFLHGNPTSSYVWRNIIPHVAPTHRCIAPDLIGMGKSDKPDLGYFFDDHVRFMDAFIEALGLEEVVLVIHDWGSALGFHWAKRNPERVKGIAFMEFIRPIPTWDEWPEFARETFQAFRTTDVGRKLIIDQNVFIEGTLPAGVVRPLTEVEMDHYREPFLNPVDREPLWRFPNELPIAGEPANIVALVEEYMDWLHQSPVPKLLFWGTPGVLIPPAEAARLAKSLPNCKAVDIGPGLNLLQEDNPDLIGSEIARWLSTLEISG

SEQ ID NO: 2108 - protein, 277 aa, Synthetic construct
MFHYVDVGPRDGTPVLFLHGNPTSSYVWRNIIPHVAPTHRCIAPDLIGMGKSDKPDLGYFFDDHVRFMDAFIEALGLEEVVLVIHDWGSALGFHWAKRNPERVKGIAFMEFIRPIPTWDEWPEFARETFQAFRTTDVGRKLIIDQNVFIEGTLPSGVVRPLTEVEMDHYREPFLNPVDREPLWRFPNELPIAGEPANIVALVEEYMDWLHQSPVPKLLFWGTPGVLIPPAEAARLAKSLPNCKAVDIGPGLNLLQEDNPDLIGSEIARWLSTLEISG

SEQ ID NO: 2109 - protein, 277 aa, Synthetic construct
MFHYVDVGPRDGTPVLFLHGNPTSSYVWRNIIPHVAPTHRCIAPDLIGMGKSDKPDLGYFFDDHVRFMDAFIEALGLEEVVLVIHDWGSALGFHWAKRNPERVKGIAFMEFIRPIPTWDEWPEFARETFQAFRTTDVGRKLIIDQNVFIEGTLPRGVVRPLTEVEMDHYREPFLNPVDREPLWRFPNELPIAGEPANIVALVEEYMDWLHQSPVPKLLFWGTPGVLIPPAEAARLAKSLPNCKAVDIGPGLNLLQEDNPDLIGSEIARWLSTLEISG

SEQ ID NO: 2110 - protein, 277 aa, Synthetic construct
MFHYVDVGPRDGTPVLFLHGNPTSSYVWRNIIPHVAPTHRCIAPDLIGMGKSDKPDLGYFFDDHVRFMDAFIEALGLEEVVLVIHDWGSALGFHWAKRNPERVKGIAFMEFIRPIPTWDEWPEFARETFQAFRTTDVGRKLIIDQNVFIEGTLPLGVVRPLTEVEMDHYREPFLNPVDREPLWRFPNELPIAGEPANIVALVEEYMDWLHQSPVPKLLFWGTPGVLIPPAEAARLAKSLPNCKAVDIGPGLNLLQEDNPDLIGSEIARWLSTLEISG

SEQ ID NO: 2111 - protein, 277 aa, Synthetic construct
MFHYVDVGPRDGTPVLFLHGNPTSSYVWRNIIPHVAPTHRCIAPDLIGMGKSDKPDLGYFFDDHVRFMDAFIEALGLEEVVLVIHDWGSALGFHWAKRNPERVKGIAFMEFIRPIPTWDEWPEFARETFQAFRTTDVGRKLIIDQNVFIEGTLPKGVVRPLTEVEMDHYREPFLNPVDREPLWRFPNELPIAGEPANIVALVEEYMDWLHQSPVPKLLFWGTPGVLIPPAEAARLAKSLPNCKAVDIGPGLNLLQEDNPDLIGSEIARWLSTLEISG

SEQ ID NO: 2112 - protein, 277 aa, Synthetic construct
MFHYVDVGPRDGTPVLFLHGNPTSSYVWRNIIPHVAPTHRCIAPDLIGMGKSDKPDLGYFFDDHVRFMDAFIEALGLEEVVLVIHDWGSALGFHWAKRNPERVKGIAFMEFIRPIPTWDEWPEFARETFQAFRTTDVGRKLIIDQNVFIEGTLPMAVVRPLTEVEMDHYREPFLNPVDREPLWRFPNELPIAGEPANIVALVEEYMDWLHQSPVPKLLFWGTPGVLIPPAEAARLAKSLPNCKAVDIGPGLNLLQEDNPDLIGSEIARWLSTLEISG

SEQ ID NO: 2113 - protein, 277 aa, Synthetic construct
MFHYVDVGPRDGTPVLFLHGNPTSSYVWRNIIPHVAPTHRCIAPDLIGMGKSDKPDLGYFFDDHVRFMDAFIEALGLEEVVLVIHDWGSALGFHWAKRNPERVKGIAFMEFIRPIPTWDEWPEFARETFQAFRTTDVGRKLIIDQNVFIEGTLPMTVVRPLTEVEMDHYREPFLNPVDREPLWRFPNELPIAGEPANIVALVEEYMDWLHQSPVPKLLFWGTPGVLIPPAEAARLAKSLPNCKAVDIGPGLNLLQEDNPDLIGSEIARWLSTLEISG

SEQ ID NO: 2114 - protein, 277 aa, Synthetic construct
MFHYVDVGPRDGTPVLFLHGNPTSSYVWRNIIPHVAPTHRCIAPDLIGMGKSDKPDLGYFFDDHVRFMDAFIEALGLEEVVLVIHDWGSALGFHWAKRNPERVKGIAFMEFIRPIPTWDEWPEFARETFQAFRTTDVGRKLIIDQNVFIEGTLPMMVVRPLTEVEMDHYREPFLNPVDREPLWRFPNELPIAGEPANIVALVEEYMDWLHQSPVPKLLFWGTPGVLIPPAEAARLAKSLPNCKAVDIGPGLNLLQEDNPDLIGSEIARWLSTLEISG

SEQ ID NO: 2115 - protein, 277 aa, Synthetic construct
MFHYVDVGPRDGTPVLFLHGNPTSSYVWRNIIPHVAPTHRCIAPDLIGMGKSDKPDLGYFFDDHVRFMDAFIEALGLEEVVLVIHDWGSALGFHWAKRNPERVKGIAFMEFIRPIPTWDEWPEFARETFQAFRTTDVGRKLIIDQNVFIEGTLPMLVVRPLTEVEMDHYREPFLNPVDREPLWRFPNELPIAGEPANIVALVEEYMDWLHQSPVPKLLFWGTPGVLIPPAEAARLAKSLPNCKAVDIGPGLNLLQEDNPDLIGSEIARWLSTLEISG

SEQ ID NO: 2116 - protein, 277 aa, Synthetic construct
MFHYVDVGPRDGTPVLFLHGNPTSSYVWRNIIPHVAPTHRCIAPDLIGMGKSDKPDLGYFFDDHVRFMDAFIEALGLEEVVLVIHDWGSALGFHWAKRNPERVKGIAFMEFIRPIPTWDEWPEFARETFQAFRTTDVGRKLIIDQNVFIEGTLPMNVVRPLTEVEMDHYREPFLNPVDREPLWRFPNELPIAGEPANIVALVEEYMDWLHQSPVPKLLFWGTPGVLIPPAEAARLAKSLPNCKAVDIGPGLNLLQEDNPDLIGSEIARWLSTLEISG

SEQ ID NO: 2117 - protein, 277 aa, Synthetic construct
MFHYVDVGPRDGTPVLFLHGNPTSSYVWRNIIPHVAPTHRCIAPDLIGMGKSDKPDLGYFFDDHVRFMDAFIEALGLEEVVLVIHDWGSALGFHWAKRNPERVKGIAFMEFIRPIPTWDEWPEFARETFQAFRTTDVGRKLIIDQNVFIEGTLPMGIVRPLTEVEMDHYREPFLNPVDREPLWRFPNELPIAGEPANIVALVEEYMDWLHQSPVPKLLFWGTPGVLIPPAEAARLAKSLPNCKAVDIGPGLNLLQEDNPDLIGSEIARWLSTLEISG

SEQ ID NO: 2118 - protein, 277 aa, Synthetic construct
MFHYVDVGPRDGTPVLFLHGNPTSSYVWRNIIPHVAPTHRCIAPDLIGMGKSDKPDLGYFFDDHVRFMDAFIEALGLEEVVLVIHDWGSALGFHWAKRNPERVKGIAFMEFIRPIPTWDEWPEFARETFQAFRTTDVGRKLIIDQNVFIEGTLPMGLVRPLTEVEMDHYREPFLNPVDREPLWRFPNELPIAGEPANIVALVEEYMDWLHQSPVPKLLFWGTPGVLIPPAEAARLAKSLPNCKAVDIGPGLNLLQEDNPDLIGSEIARWLSTLEISG

SEQ ID NO: 2119 - protein, 277 aa, Synthetic construct
MFHYVDVGPRDGTPVLFLHGNPTSSYVWRNIIPHVAPTHRCIAPDLIGMGKSDKPDLGYFFDDHVRFMDAFIEALGLEEVVLVIHDWGSALGFHWAKRNPERVKGIAFMEFIRPIPTWDEWPEFARETFQAFRTTDVGRKLIIDQNVFIEGTLPMGAVRPLTEVEMDHYREPFLNPVDREPLWRFPNELPIAGEPANIVALVEEYMDWLHQSPVPKLLFWGTPGVLIPPAEAARLAKSLPNCKAVDIGPGLNLLQEDNPDLIGSEIARWLSTLEISG

SEQ ID NO: 2120 - protein, 277 aa, Synthetic construct
MFHYVDVGPRDGTPVLFLHGNPTSSYVWRNIIPHVAPTHRCIAPDLIGMGKSDKPDLGYFFDDHVRFMDAFIEALGLEEVVLVIHDWGSALGFHWAKRNPERVKGIAFMEFIRPIPTWDEWPEFARETFQAFRTTDVGRKLIIDQNVFIEGTLPMGTVRPLTEVEMDHYREPFLNPVDREPLWRFPNELPIAGEPANIVALVEEYMDWLHQSPVPKLLFWGTPGVLIPPAEAARLAKSLPNCKAVDIGPGLNLLQEDNPDLIGSEIARWLSTLEISG

SEQ ID NO: 2121 - protein, 277 aa, Synthetic construct
MFHYVDVGPRDGTPVLFLHGNPTSSYVWRNIIPHVAPTHRCIAPDLIGMGKSDKPDLGYFFDDHVRFMDAFIEALGLEEVVLVIHDWGSALGFHWAKRNPERVKGIAFMEFIRPIPTWDEWPEFARETFQAFRTTDVGRKLIIDQNVFIEGTLPMGMVRPLTEVEMDHYREPFLNPVDREPLWRFPNELPIAGEPANIVALVEEYMDWLHQSPVPKLLFWGTPGVLIPPAEAARLAKSLPNCKAVDIGPGLNLLQEDNPDLIGSEIARWLSTLEISG

SEQ ID NO: 2122 - protein, 277 aa, Synthetic construct
MFHYVDVGPRDGTPVLFLHGNPTSSYVWRNIIPHVAPTHRCIAPDLIGMGKSDKPDLGYFFDDHVRFMDAFIEALGLEEVVLVIHDWGSALGFHWAKRNPERVKGIAFMEFIRPIPTWDEWPEFARETFQAFRTTDVGRKLIIDQNVFIEGTLPMGSVRPLTEVEMDHYREPFLNPVDREPLWRFPNELPIAGEPANIVALVEEYMDWLHQSPVPKLLFWGTPGVLIPPAEAARLAKSLPNCKAVDIGPGLNLLQEDNPDLIGSEIARWLSTLEISG

SEQ ID NO: 2123 - protein, 277 aa, Synthetic construct
MFHYVDVGPRDGTPVLFLHGNPTSSYVWRNIIPHVAPTHRCIAPDLIGMGKSDKPDLGYFFDDHVRFMDAFIEALGLEEVVLVIHDWGSALGFHWAKRNPERVKGIAFMEFIRPIPTWDEWPEFARETFQAFRTTDVGRKLIIDQNVFIEGTLPMGVLRPLTEVEMDHYREPFLNPVDREPLWRFPNELPIAGEPANIVALVEEYMDWLHQSPVPKLLFWGTPGVLIPPAEAARLAKSLPNCKAVDIGPGLNLLQEDNPDLIGSEIARWLSTLEISG

SEQ ID NO: 2124 - protein, 277 aa, Synthetic construct
MFHYVDVGPRDGTPVLFLHGNPTSSYVWRNIIPHVAPTHRCIAPDLIGMGKSDKPDLGYFFDDHVRFMDAFIEALGLEEVVLVIHDWGSALGFHWAKRNPERVKGIAFMEFIRPIPTWDEWPEFARETFQAFRTTDVGRKLIIDQNVFIEGTLPMGVIRPLTEVEMDHYREPFLNPVDREPLWRFPNELPIAGEPANIVALVEEYMDWLHQSPVPKLLFWGTPGVLIPPAEAARLAKSLPNCKAVDIGPGLNLLQEDNPDLIGSEIARWLSTLEISG

SEQ ID NO: 2125 - protein, 277 aa, Synthetic construct
MFHYVDVGPRDGTPVLFLHGNPTSSYVWRNIIPHVAPTHRCIAPDLIGMGKSDKPDLGYFFDDHVRFMDAFIEALGLEEVVLVIHDWGSALGFHWAKRNPERVKGIAFMEFIRPIPTWDEWPEFARETFQAFRTTDVGRKLIIDQNVFIEGTLPMGVMRPLTEVEMDHYREPFLNPVDREPLWRFPNELPIAGEPANIVALVEEYMDWLHQSPVPKLLFWGTPGVLIPPAEAARLAKSLPNCKAVDIGPGLNLLQEDNPDLIGSEIARWLSTLEISG

SEQ ID NO: 2126 - protein, 277 aa, Synthetic construct
MFHYVDVGPRDGTPVLFLHGNPTSSYVWRNIIPHVAPTHRCIAPDLIGMGKSDKPDLGYFFDDHVRFMDAFIEALGLEEVVLVIHDWGSALGFHWAKRNPERVKGIAFMEFIRPIPTWDEWPEFARETFQAFRTTDVGRKLIIDQNVFIEGTLPMGVARPLTEVEMDHYREPFLNPVDREPLWRFPNELPIAGEPANIVALVEEYMDWLHQSPVPKLLFWGTPGVLIPPAEAARLAKSLPNCKAVDIGPGLNLLQEDNPDLIGSEIARWLSTLEISG

SEQ ID NO: 2127 - protein, 277 aa, Synthetic construct
MFHYVDVGPRDGTPVLFLHGNPTSSYVWRNIIPHVAPTHRCIAPDLIGMGKSDKPDLGYFFDDHVRFMDAFIEALGLEEVVLVIHDWGSALGFHWAKRNPERVKGIAFMEFIRPIPTWDEWPEFARETFQAFRTTDVGRKLIIDQNVFIEGTLPMGVTRPLTEVEMDHYREPFLNPVDREPLWRFPNELPIAGEPANIVALVEEYMDWLHQSPVPKLLFWGTPGVLIPPAEAARLAKSLPNCKAVDIGPGLNLLQEDNPDLIGSEIARWLSTLEISG

SEQ ID NO: 2128 - protein, 277 aa, Synthetic construct
MFHYVDVGPRDGTPVLFLHGNPTSSYVWRNIIPHVAPTHRCIAPDLIGMGKSDKPDLGYFFDDHVRFMDAFIEALGLEEVVLVIHDWGSALGFHWAKRNPERVKGIAFMEFIRPIPTWDEWPEFARETFQAFRTTDVGRKLIIDQNVFIEGTLPMGVRRPLTEVEMDHYREPFLNPVDREPLWRFPNELPIAGEPANIVALVEEYMDWLHQSPVPKLLFWGTPGVLIPPAEAARLAKSLPNCKAVDIGPGLNLLQEDNPDLIGSEIARWLSTLEISG

SEQ ID NO: 2129 - protein, 277 aa, Synthetic construct
MFHYVDVGPRDGTPVLFLHGNPTSSYVWRNIIPHVAPTHRCIAPDLIGMGKSDKPDLGYFFDDHVRFMDAFIEALGLEEVVLVIHDWGSALGFHWAKRNPERVKGIAFMEFIRPIPTWDEWPEFARETFQAFRTTDVGRKLIIDQNVFIEGTLPMGVVKPLTEVEMDHYREPFLNPVDREPLWRFPNELPIAGEPANIVALVEEYMDWLHQSPVPKLLFWGTPGVLIPPAEAARLAKSLPNCKAVDIGPGLNLLQEDNPDLIGSEIARWLSTLEISG

SEQ ID NO: 2130 - protein, 277 aa, Synthetic construct
MFHYVDVGPRDGTPVLFLHGNPTSSYVWRNIIPHVAPTHRCIAPDLIGMGKSDKPDLGYFFDDHVRFMDAFIEALGLEEVVLVIHDWGSALGFHWAKRNPERVKGIAFMEFIRPIPTWDEWPEFARETFQAFRTTDVGRKLIIDQNVFIEGTLPMGVVHPLTEVEMDHYREPFLNPVDREPLWRFPNELPIAGEPANIVALVEEYMDWLHQSPVPKLLFWGTPGVLIPPAEAARLAKSLPNCKAVDIGPGLNLLQEDNPDLIGSEIARWLSTLEISG

SEQ ID NO: 2131 - protein, 277 aa, Synthetic construct
MFHYVDVGPRDGTPVLFLHGNPTSSYVWRNIIPHVAPTHRCIAPDLIGMGKSDKPDLGYFFDDHVRFMDAFIEALGLEEVVLVIHDWGSALGFHWAKRNPERVKGIAFMEFIRPIPTWDEWPEFARETFQAFRTTDVGRKLIIDQNVFIEGTLPMGVVSPLTEVEMDHYREPFLNPVDREPLWRFPNELPIAGEPANIVALVEEYMDWLHQSPVPKLLFWGTPGVLIPPAEAARLAKSLPNCKAVDIGPGLNLLQEDNPDLIGSEIARWLSTLEISG

SEQ ID NO: 2132 - protein, 277 aa, Synthetic construct
MFHYVDVGPRDGTPVLFLHGNPTSSYVWRNIIPHVAPTHRCIAPDLIGMGKSDKPDLGYFFDDHVRFMDAFIEALGLEEVVLVIHDWGSALGFHWAKRNPERVKGIAFMEFIRPIPTWDEWPEFARETFQAFRTTDVGRKLIIDQNVFIEGTLPMGVVNPLTEVEMDHYREPFLNPVDREPLWRFPNELPIAGEPANIVALVEEYMDWLHQSPVPKLLFWGTPGVLIPPAEAARLAKSLPNCKAVDIGPGLNLLQEDNPDLIGSEIARWLSTLEISG

SEQ ID NO: 2133 - protein, 277 aa, Synthetic construct
MFHYVDVGPRDGTPVLFLHGNPTSSYVWRNIIPHVAPTHRCIAPDLIGMGKSDKPDLGYFFDDHVRFMDAFIEALGLEEVVLVIHDWGSALGFHWAKRNPERVKGIAFMEFIRPIPTWDEWPEFARETFQAFRTTDVGRKLIIDQNVFIEGTLPMGVVQPLTEVEMDHYREPFLNPVDREPLWRFPNELPIAGEPANIVALVEEYMDWLHQSPVPKLLFWGTPGVLIPPAEAARLAKSLPNCKAVDIGPGLNLLQEDNPDLIGSEIARWLSTLEISG

SEQ ID NO: 2134 - protein, 277 aa, Synthetic construct
MFHYVDVGPRDGTPVLFLHGNPTSSYVWRNIIPHVAPTHRCIAPDLIGMGKSDKPDLGYFFDDHVRFMDAFIEALGLEEVVLVIHDWGSALGFHWAKRNPERVKGIAFMEFIRPIPTWDEWPEFARETFQAFRTTDVGRKLIIDQNVFIEGTLPMGVVTPLTEVEMDHYREPFLNPVDREPLWRFPNELPIAGEPANIVALVEEYMDWLHQSPVPKLLFWGTPGVLIPPAEAARLAKSLPNCKAVDIGPGLNLLQEDNPDLIGSEIARWLSTLEISG

SEQ ID NO: 2135 - protein, 277 aa, Synthetic construct
MFHYVDVGPRDGTPVLFLHGNPTSSYVWRNIIPHVAPTHRCIAPDLIGMGKSDKPDLGYFFDDHVRFMDAFIEALGLEEVVLVIHDWGSALGFHWAKRNPERVKGIAFMEFIRPIPTWDEWPEFARETFQAFRTTDVGRKLIIDQNVFIEGTLPMGVVRDLTEVEMDHYREPFLNPVDREPLWRFPNELPIAGEPANIVALVEEYMDWLHQSPVPKLLFWGTPGVLIPPAEAARLAKSLPNCKAVDIGPGLNLLQEDNPDLIGSEIARWLSTLEISG

SEQ ID NO: 2136 - protein, 277 aa, Synthetic construct
MFHYVDVGPRDGTPVLFLHGNPTSSYVWRNIIPHVAPTHRCIAPDLIGMGKSDKPDLGYFFDDHVRFMDAFIEALGLEEVVLVIHDWGSALGFHWAKRNPERVKGIAFMEFIRPIPTWDEWPEFARETFQAFRTTDVGRKLIIDQNVFIEGTLPMGVVRELTEVEMDHYREPFLNPVDREPLWRFPNELPIAGEPANIVALVEEYMDWLHQSPVPKLLFWGTPGVLIPPAEAARLAKSLPNCKAVDIGPGLNLLQEDNPDLIGSEIARWLSTLEISG

SEQ ID NO: 2137 - protein, 277 aa, Synthetic construct
MFHYVDVGPRDGTPVLFLHGNPTSSYVWRNIIPHVAPTHRCIAPDLIGMGKSDKPDLGYFFDDHVRFMDAFIEALGLEEVVLVIHDWGSALGFHWAKRNPERVKGIAFMEFIRPIPTWDEWPEFARETFQAFRTTDVGRKLIIDQNVFIEGTLPMGVVRNLTEVEMDHYREPFLNPVDREPLWRFPNELPIAGEPANIVALVEEYMDWLHQSPVPKLLFWGTPGVLIPPAEAARLAKSLPNCKAVDIGPGLNLLQEDNPDLIGSEIARWLSTLEISG

SEQ ID NO: 2138 - protein, 277 aa, Synthetic construct
MFHYVDVGPRDGTPVLFLHGNPTSSYVWRNIIPHVAPTHRCIAPDLIGMGKSDKPDLGYFFDDHVRFMDAFIEALGLEEVVLVIHDWGSALGFHWAKRNPERVKGIAFMEFIRPIPTWDEWPEFARETFQAFRTTDVGRKLIIDQNVFIEGTLPMGVVRGLTEVEMDHYREPFLNPVDREPLWRFPNELPIAGEPANIVALVEEYMDWLHQSPVPKLLFWGTPGVLIPPAEAARLAKSLPNCKAVDIGPGLNLLQEDNPDLIGSEIARWLSTLEISG

SEQ ID NO: 2139 - protein, 277 aa, Synthetic construct
MFHYVDVGPRDGTPVLFLHGNPTSSYVWRNIIPHVAPTHRCIAPDLIGMGKSDKPDLGYFFDDHVRFMDAFIEALGLEEVVLVIHDWGSALGFHWAKRNPERVKGIAFMEFIRPIPTWDEWPEFARETFQAFRTTDVGRKLIIDQNVFIEGTLPMGVVRSLTEVEMDHYREPFLNPVDREPLWRFPNELPIAGEPANIVALVEEYMDWLHQSPVPKLLFWGTPGVLIPPAEAARLAKSLPNCKAVDIGPGLNLLQEDNPDLIGSEIARWLSTLEISG

SEQ ID NO: 2140 - protein, 277 aa, Synthetic construct
MFHYVDVGPRDGTPVLFLHGNPTSSYVWRNIIPHVAPTHRCIAPDLIGMGKSDKPDLGYFFDDHVRFMDAFIEALGLEEVVLVIHDWGSALGFHWAKRNPERVKGIAFMEFIRPIPTWDEWPEFARETFQAFRTTDVGRKLIIDQNVFIEGTLPMGVVRPITEVEMDHYREPFLNPVDREPLWRFPNELPIAGEPANIVALVEEYMDWLHQSPVPKLLFWGTPGVLIPPAEAARLAKSLPNCKAVDIGPGLNLLQEDNPDLIGSEIARWLSTLEISG

SEQ ID NO: 2141 - protein, 277 aa, Synthetic construct
MFHYVDVGPRDGTPVLFLHGNPTSSYVWRNIIPHVAPTHRCIAPDLIGMGKSDKPDLGYFFDDHVRFMDAFIEALGLEEVVLVIHDWGSALGFHWAKRNPERVKGIAFMEFIRPIPTWDEWPEFARETFQAFRTTDVGRKLIIDQNVFIEGTLPMGVVRPFTEVEMDHYREPFLNPVDREPLWRFPNELPIAGEPANIVALVEEYMDWLHQSPVPKLLFWGTPGVLIPPAEAARLAKSLPNCKAVDIGPGLNLLQEDNPDLIGSEIARWLSTLEISG

SEQ ID NO: 2142 - protein, 277 aa, Synthetic construct
MFHYVDVGPRDGTPVLFLHGNPTSSYVWRNIIPHVAPTHRCIAPDLIGMGKSDKPDLGYFFDDHVRFMDAFIEALGLEEVVLVIHDWGSALGFHWAKRNPERVKGIAFMEFIRPIPTWDEWPEFARETFQAFRTTDVGRKLIIDQNVFIEGTLPMGVVRPVTEVEMDHYREPFLNPVDREPLWRFPNELPIAGEPANIVALVEEYMDWLHQSPVPKLLFWGTPGVLIPPAEAARLAKSLPNCKAVDIGPGLNLLQEDNPDLIGSEIARWLSTLEISG

SEQ ID NO: 2143 - protein, 277 aa, Synthetic construct
MFHYVDVGPRDGTPVLFLHGNPTSSYVWRNIIPHVAPTHRCIAPDLIGMGKSDKPDLGYFFDDHVRFMDAFIEALGLEEVVLVIHDWGSALGFHWAKRNPERVKGIAFMEFIRPIPTWDEWPEFARETFQAFRTTDVGRKLIIDQNVFIEGTLPMGVVRPPTEVEMDHYREPFLNPVDREPLWRFPNELPIAGEPANIVALVEEYMDWLHQSPVPKLLFWGTPGVLIPPAEAARLAKSLPNCKAVDIGPGLNLLQEDNPDLIGSEIARWLSTLEISG

SEQ ID NO: 2144 - protein, 277 aa, Synthetic construct
MFHYVDVGPRDGTPVLFLHGNPTSSYVWRNIIPHVAPTHRCIAPDLIGMGKSDKPDLGYFFDDHVRFMDAFIEALGLEEVVLVIHDWGSALGFHWAKRNPERVKGIAFMEFIRPIPTWDEWPEFARETFQAFRTTDVGRKLIIDQNVFIEGTLPMGVVRPATEVEMDHYREPFLNPVDREPLWRFPNELPIAGEPANIVALVEEYMDWLHQSPVPKLLFWGTPGVLIPPAEAARLAKSLPNCKAVDIGPGLNLLQEDNPDLIGSEIARWLSTLEISG

SEQ ID NO: 2145 - protein, 277 aa, Synthetic construct
MFHYVDVGPRDGTPVLFLHGNPTSSYVWRNIIPHVAPTHRCIAPDLIGMGKSDKPDLGYFFDDHVRFMDAFIEALGLEEVVLVIHDWGSALGFHWAKRNPERVKGIAFMEFIRPIPTWDEWPEFARETFQAFRTTDVGRKLIIDQNVFIEGTLPMGVVRPLSEVEMDHYREPFLNPVDREPLWRFPNELPIAGEPANIVALVEEYMDWLHQSPVPKLLFWGTPGVLIPPAEAARLAKSLPNCKAVDIGPGLNLLQEDNPDLIGSEIARWLSTLEISG

SEQ ID NO: 2146 - protein, 277 aa, Synthetic construct
MFHYVDVGPRDGTPVLFLHGNPTSSYVWRNIIPHVAPTHRCIAPDLIGMGKSDKPDLGYFFDDHVRFMDAFIEALGLEEVVLVIHDWGSALGFHWAKRNPERVKGIAFMEFIRPIPTWDEWPEFARETFQAFRTTDVGRKLIIDQNVFIEGTLPMGVVRPLDEVEMDHYREPFLNPVDREPLWRFPNELPIAGEPANIVALVEEYMDWLHQSPVPKLLFWGTPGVLIPPAEAARLAKSLPNCKAVDIGPGLNLLQEDNPDLIGSEIARWLSTLEISG

SEQ ID NO: 2147 - protein, 277 aa, Synthetic construct
MFHYVDVGPRDGTPVLFLHGNPTSSYVWRNIIPHVAPTHRCIAPDLIGMGKSDKPDLGYFFDDHVRFMDAFIEALGLEEVVLVIHDWGSALGFHWAKRNPERVKGIAFMEFIRPIPTWDEWPEFARETFQAFRTTDVGRKLIIDQNVFIEGTLPMGVVRPLGEVEMDHYREPFLNPVDREPLWRFPNELPIAGEPANIVALVEEYMDWLHQSPVPKLLFWGTPGVLIPPAEAARLAKSLPNCKAVDIGPGLNLLQEDNPDLIGSEIARWLSTLEISG

SEQ ID NO: 2148 - protein, 277 aa, Synthetic construct
MFHYVDVGPRDGTPVLFLHGNPTSSYVWRNIIPHVAPTHRCIAPDLIGMGKSDKPDLGYFFDDHVRFMDAFIEALGLEEVVLVIHDWGSALGFHWAKRNPERVKGIAFMEFIRPIPTWDEWPEFARETFQAFRTTDVGRKLIIDQNVFIEGTLPMGVVRPLNEVEMDHYREPFLNPVDREPLWRFPNELPIAGEPANIVALVEEYMDWLHQSPVPKLLFWGTPGVLIPPAEAARLAKSLPNCKAVDIGPGLNLLQEDNPDLIGSEIARWLSTLEISG

SEQ ID NO: 2149 - protein, 277 aa, Synthetic construct
MFHYVDVGPRDGTPVLFLHGNPTSSYVWRNIIPHVAPTHRCIAPDLIGMGKSDKPDLGYFFDDHVRFMDAFIEALGLEEVVLVIHDWGSALGFHWAKRNPERVKGIAFMEFIRPIPTWDEWPEFARETFQAFRTTDVGRKLIIDQNVFIEGTLPMGVVRPLAEVEMDHYREPFLNPVDREPLWRFPNELPIAGEPANIVALVEEYMDWLHQSPVPKLLFWGTPGVLIPPAEAARLAKSLPNCKAVDIGPGLNLLQEDNPDLIGSEIARWLSTLEISG

SEQ ID NO: 2150 - protein, 277 aa, Synthetic construct
MFHYVDVGPRDGTPVLFLHGNPTSSYVWRNIIPHVAPTHRCIAPDLIGMGKSDKPDLGYFFDDHVRFMDAFIEALGLEEVVLVIHDWGSALGFHWAKRNPERVKGIAFMEFIRPIPTWDEWPEFARETFQAFRTTDVGRKLIIDQNVFIEGTLPMGVVRPLPEVEMDHYREPFLNPVDREPLWRFPNELPIAGEPANIVALVEEYMDWLHQSPVPKLLFWGTPGVLIPPAEAARLAKSLPNCKAVDIGPGLNLLQEDNPDLIGSEIARWLSTLEISG

SEQ ID NO: 2151 - protein, 277 aa, Synthetic construct
MFHYVDVGPRDGTPVLFLHGNPTSSYVWRNIIPHVAPTHRCIAPDLIGMGKSDKPDLGYFFDDHVRFMDAFIEALGLEEVVLVIHDWGSALGFHWAKRNPERVKGIAFMEFIRPIPTWDEWPEFARETFQAFRTTDVGRKLIIDQNVFIEGTLPMGVVRPLTDVEMDHYREPFLNPVDREPLWRFPNELPIAGEPANIVALVEEYMDWLHQSPVPKLLFWGTPGVLIPPAEAARLAKSLPNCKAVDIGPGLNLLQEDNPDLIGSEIARWLSTLEISG

SEQ ID NO: 2152 - protein, 277 aa, Synthetic construct
MFHYVDVGPRDGTPVLFLHGNPTSSYVWRNIIPHVAPTHRCIAPDLIGMGKSDKPDLGYFFDDHVRFMDAFIEALGLEEVVLVIHDWGSALGFHWAKRNPERVKGIAFMEFIRPIPTWDEWPEFARETFQAFRTTDVGRKLIIDQNVFIEGTLPMGVVRPLTPVEMDHYREPFLNPVDREPLWRFPNELPIAGEPANIVALVEEYMDWLHQSPVPKLLFWGTPGVLIPPAEAARLAKSLPNCKAVDIGPGLNLLQEDNPDLIGSEIARWLSTLEISG

SEQ ID NO: 2153 - protein, 277 aa, Synthetic construct
MFHYVDVGPRDGTPVLFLHGNPTSSYVWRNIIPHVAPTHRCIAPDLIGMGKSDKPDLGYFFDDHVRFMDAFIEALGLEEVVLVIHDWGSALGFHWAKRNPERVKGIAFMEFIRPIPTWDEWPEFARETFQAFRTTDVGRKLIIDQNVFIEGTLPMGVVRPLTQVEMDHYREPFLNPVDREPLWRFPNELPIAGEPANIVALVEEYMDWLHQSPVPKLLFWGTPGVLIPPAEAARLAKSLPNCKAVDIGPGLNLLQEDNPDLIGSEIARWLSTLEISG

SEQ ID NO: 2154 - protein, 277 aa, Synthetic construct
MFHYVDVGPRDGTPVLFLHGNPTSSYVWRNIIPHVAPTHRCIAPDLIGMGKSDKPDLGYFFDDHVRFMDAFIEALGLEEVVLVIHDWGSALGFHWAKRNPERVKGIAFMEFIRPIPTWDEWPEFARETFQAFRTTDVGRKLIIDQNVFIEGTLPMGVVRPLTAVEMDHYREPFLNPVDREPLWRFPNELPIAGEPANIVALVEEYMDWLHQSPVPKLLFWGTPGVLIPPAEAARLAKSLPNCKAVDIGPGLNLLQEDNPDLIGSEIARWLSTLEISG

SEQ ID NO: 2155 - protein, 277 aa, Synthetic construct
MFHYVDVGPRDGTPVLFLHGNPTSSYVWRNIIPHVAPTHRCIAPDLIGMGKSDKPDLGYFFDDHVRFMDAFIEALGLEEVVLVIHDWGSALGFHWAKRNPERVKGIAFMEFIRPIPTWDEWPEFARETFQAFRTTDVGRKLIIDQNVFIEGTLPMGVVRPLTKVEMDHYREPFLNPVDREPLWRFPNELPIAGEPANIVALVEEYMDWLHQSPVPKLLFWGTPGVLIPPAEAARLAKSLPNCKAVDIGPGLNLLQEDNPDLIGSEIARWLSTLEISG

SEQ ID NO: 2156 - protein, 277 aa, Synthetic construct
MFHYVDVGPRDGTPVLFLHGNPTSSYVWRNIIPHVAPTHRCIAPDLIGMGKSDKPDLGYFFDDHVRFMDAFIEALGLEEVVLVIHDWGSALGFHWAKRNPERVKGIAFMEFIRPIPTWDEWPEFARETFQAFRTTDVGRKLIIDQNVFIEGTLPMGVVRPLTSVEMDHYREPFLNPVDREPLWRFPNELPIAGEPANIVALVEEYMDWLHQSPVPKLLFWGTPGVLIPPAEAARLAKSLPNCKAVDIGPGLNLLQEDNPDLIGSEIARWLSTLEISG

SEQ ID NO: 2157 - protein, 277 aa, Synthetic construct
MFHYVDVGPRDGTPVLFLHGNPTSSYVWRNIIPHVAPTHRCIAPDLIGMGKSDKPDLGYFFDDHVRFMDAFIEALGLEEVVLVIHDWGSALGFHWAKRNPERVKGIAFMEFIRPIPTWDEWPEFARETFQAFRTTDVGRKLIIDQNVFIEGTLPMGVVRPLTEAEMDHYREPFLNPVDREPLWRFPNELPIAGEPANIVALVEEYMDWLHQSPVPKLLFWGTPGVLIPPAEAARLAKSLPNCKAVDIGPGLNLLQEDNPDLIGSEIARWLSTLEISG

SEQ ID NO: 2158 - protein, 277 aa, Synthetic construct
MFHYVDVGPRDGTPVLFLHGNPTSSYVWRNIIPHVAPTHRCIAPDLIGMGKSDKPDLGYFFDDHVRFMDAFIEALGLEEVVLVIHDWGSALGFHWAKRNPERVKGIAFMEFIRPIPTWDEWPEFARETFQAFRTTDVGRKLIIDQNVFIEGTLPMGVVRPLTEEEMDHYREPFLNPVDREPLWRFPNELPIAGEPANIVALVEEYMDWLHQSPVPKLLFWGTPGVLIPPAEAARLAKSLPNCKAVDIGPGLNLLQEDNPDLIGSEIARWLSTLEISG

SEQ ID NO: 2159 - protein, 277 aa, Synthetic construct
MFHYVDVGPRDGTPVLFLHGNPTSSYVWRNIIPHVAPTHRCIAPDLIGMGKSDKPDLGYFFDDHVRFMDAFIEALGLEEVVLVIHDWGSALGFHWAKRNPERVKGIAFMEFIRPIPTWDEWPEFARETFQAFRTTDVGRKLIIDQNVFIEGTLPMGVVRPLTEQEMDHYREPFLNPVDREPLWRFPNELPIAGEPANIVALVEEYMDWLHQSPVPKLLFWGTPGVLIPPAEAARLAKSLPNCKAVDIGPGLNLLQEDNPDLIGSEIARWLSTLEISG

SEQ ID NO: 2160 - protein, 277 aa, Synthetic construct
MFHYVDVGPRDGTPVLFLHGNPTSSYVWRNIIPHVAPTHRCIAPDLIGMGKSDKPDLGYFFDDHVRFMDAFIEALGLEEVVLVIHDWGSALGFHWAKRNPERVKGIAFMEFIRPIPTWDEWPEFARETFQAFRTTDVGRKLIIDQNVFIEGTLPMGVVRPLTEDEMDHYREPFLNPVDREPLWRFPNELPIAGEPANIVALVEEYMDWLHQSPVPKLLFWGTPGVLIPPAEAARLAKSLPNCKAVDIGPGLNLLQEDNPDLIGSEIARWLSTLEISG

SEQ ID NO: 2161 - protein, 277 aa, Synthetic construct
MFHYVDVGPRDGTPVLFLHGNPTSSYVWRNIIPHVAPTHRCIAPDLIGMGKSDKPDLGYFFDDHVRFMDAFIEALGLEEVVLVIHDWGSALGFHWAKRNPERVKGIAFMEFIRPIPTWDEWPEFARETFQAFRTTDVGRKLIIDQNVFIEGTLPMGVVRPLTESEMDHYREPFLNPVDREPLWRFPNELPIAGEPANIVALVEEYMDWLHQSPVPKLLFWGTPGVLIPPAEAARLAKSLPNCKAVDIGPGLNLLQEDNPDLIGSEIARWLSTLEISG

SEQ ID NO: 2162 - protein, 277 aa, Synthetic construct
MFHYVDVGPRDGTPVLFLHGNPTSSYVWRNIIPHVAPTHRCIAPDLIGMGKSDKPDLGYFFDDHVRFMDAFIEALGLEEVVLVIHDWGSALGFHWAKRNPERVKGIAFMEFIRPIPTWDEWPEFARETFQAFRTTDVGRKLIIDQNVFIEGTLPMGVVRPLTETEMDHYREPFLNPVDREPLWRFPNELPIAGEPANIVALVEEYMDWLHQSPVPKLLFWGTPGVLIPPAEAARLAKSLPNCKAVDIGPGLNLLQEDNPDLIGSEIARWLSTLEISG

SEQ ID NO: 2163 - protein, 277 aa, Synthetic construct
MFHYVDVGPRDGTPVLFLHGNPTSSYVWRNIIPHVAPTHRCIAPDLIGMGKSDKPDLGYFFDDHVRFMDAFIEALGLEEVVLVIHDWGSALGFHWAKRNPERVKGIAFMEFIRPIPTWDEWPEFARETFQAFRTTDVGRKLIIDQNVFIEGTLPMGVVRPLTEVDMDHYREPFLNPVDREPLWRFPNELPIAGEPANIVALVEEYMDWLHQSPVPKLLFWGTPGVLIPPAEAARLAKSLPNCKAVDIGPGLNLLQEDNPDLIGSEIARWLSTLEISG

SEQ ID NO: 2164 - protein, 277 aa, Synthetic construct
MFHYVDVGPRDGTPVLFLHGNPTSSYVWRNIIPHVAPTHRCIAPDLIGMGKSDKPDLGYFFDDHVRFMDAFIEALGLEEVVLVIHDWGSALGFHWAKRNPERVKGIAFMEFIRPIPTWDEWPEFARETFQAFRTTDVGRKLIIDQNVFIEGTLPMGVVRPLTEVQMDHYREPFLNPVDREPLWRFPNELPIAGEPANIVALVEEYMDWLHQSPVPKLLFWGTPGVLIPPAEAARLAKSLPNCKAVDIGPGLNLLQEDNPDLIGSEIARWLSTLEISG

SEQ ID NO: 2165 - protein, 277 aa, Synthetic construct
MFHYVDVGPRDGTPVLFLHGNPTSSYVWRNIIPHVAPTHRCIAPDLIGMGKSDKPDLGYFFDDHVRFMDAFIEALGLEEVVLVIHDWGSALGFHWAKRNPERVKGIAFMEFIRPIPTWDEWPEFARETFQAFRTTDVGRKLIIDQNVFIEGTLPMGVVRPLTEVAMDHYREPFLNPVDREPLWRFPNELPIAGEPANIVALVEEYMDWLHQSPVPKLLFWGTPGVLIPPAEAARLAKSLPNCKAVDIGPGLNLLQEDNPDLIGSEIARWLSTLEISG

SEQ ID NO: 2166 - protein, 277 aa, Synthetic construct
MFHYVDVGPRDGTPVLFLHGNPTSSYVWRNIIPHVAPTHRCIAPDLIGMGKSDKPDLGYFFDDHVRFMDAFIEALGLEEVVLVIHDWGSALGFHWAKRNPERVKGIAFMEFIRPIPTWDEWPEFARETFQAFRTTDVGRKLIIDQNVFIEGTLPMGVVRPLTEVVMDHYREPFLNPVDREPLWRFPNELPIAGEPANIVALVEEYMDWLHQSPVPKLLFWGTPGVLIPPAEAARLAKSLPNCKAVDIGPGLNLLQEDNPDLIGSEIARWLSTLEISG

SEQ ID NO: 2167 - protein, 277 aa, Synthetic construct
MFHYVDVGPRDGTPVLFLHGNPTSSYVWRNIIPHVAPTHRCIAPDLIGMGKSDKPDLGYFFDDHVRFMDAFIEALGLEEVVLVIHDWGSALGFHWAKRNPERVKGIAFMEFIRPIPTWDEWPEFARETFQAFRTTDVGRKLIIDQNVFIEGTLPMGVVRPLTEVTMDHYREPFLNPVDREPLWRFPNELPIAGEPANIVALVEEYMDWLHQSPVPKLLFWGTPGVLIPPAEAARLAKSLPNCKAVDIGPGLNLLQEDNPDLIGSEIARWLSTLEISG

SEQ ID NO: 2168 - protein, 277 aa, Synthetic construct
MFHYVDVGPRDGTPVLFLHGNPTSSYVWRNIIPHVAPTHRCIAPDLIGMGKSDKPDLGYFFDDHVRFMDAFIEALGLEEVVLVIHDWGSALGFHWAKRNPERVKGIAFMEFIRPIPTWDEWPEFARETFQAFRTTDVGRKLIIDQNVFIEGTLPMGVVRPLTEVGMDHYREPFLNPVDREPLWRFPNELPIAGEPANIVALVEEYMDWLHQSPVPKLLFWGTPGVLIPPAEAARLAKSLPNCKAVDIGPGLNLLQEDNPDLIGSEIARWLSTLEISG

SEQ ID NO: 2169 - protein, 277 aa, Synthetic construct
MFHYVDVGPRDGTPVLFLHGNPTSSYVWRNIIPHVAPTHRCIAPDLIGMGKSDKPDLGYFFDDHVRFMDAFIEALGLEEVVLVIHDWGSALGFHWAKRNPERVKGIAFMEFIRPIPTWDEWPEFARETFQAFRTTDVGRKLIIDQNVFIEGTLPMGVVRPLTEVELDHYREPFLNPVDREPLWRFPNELPIAGEPANIVALVEEYMDWLHQSPVPKLLFWGTPGVLIPPAEAARLAKSLPNCKAVDIGPGLNLLQEDNPDLIGSEIARWLSTLEISG

SEQ ID NO: 2170 - protein, 277 aa, Synthetic construct
MFHYVDVGPRDGTPVLFLHGNPTSSYVWRNIIPHVAPTHRCIAPDLIGMGKSDKPDLGYFFDDHVRFMDAFIEALGLEEVVLVIHDWGSALGFHWAKRNPERVKGIAFMEFIRPIPTWDEWPEFARETFQAFRTTDVGRKLIIDQNVFIEGTLPMGVVRPLTEVERDHYREPFLNPVDREPLWRFPNELPIAGEPANIVALVEEYMDWLHQSPVPKLLFWGTPGVLIPPAEAARLAKSLPNCKAVDIGPGLNLLQEDNPDLIGSEIARWLSTLEISG

SEQ ID NO: 2171 - protein, 277 aa, Synthetic construct
MFHYVDVGPRDGTPVLFLHGNPTSSYVWRNIIPHVAPTHRCIAPDLIGMGKSDKPDLGYFFDDHVRFMDAFIEALGLEEVVLVIHDWGSALGFHWAKRNPERVKGIAFMEFIRPIPTWDEWPEFARETFQAFRTTDVGRKLIIDQNVFIEGTLPMGVVRPLTEVEIDHYREPFLNPVDREPLWRFPNELPIAGEPANIVALVEEYMDWLHQSPVPKLLFWGTPGVLIPPAEAARLAKSLPNCKAVDIGPGLNLLQEDNPDLIGSEIARWLSTLEISG

SEQ ID NO: 2172 - protein, 277 aa, Synthetic construct
MFHYVDVGPRDGTPVLFLHGNPTSSYVWRNIIPHVAPTHRCIAPDLIGMGKSDKPDLGYFFDDHVRFMDAFIEALGLEEVVLVIHDWGSALGFHWAKRNPERVKGIAFMEFIRPIPTWDEWPEFARETFQAFRTTDVGRKLIIDQNVFIEGTLPMGVVRPLTEVEKDHYREPFLNPVDREPLWRFPNELPIAGEPANIVALVEEYMDWLHQSPVPKLLFWGTPGVLIPPAEAARLAKSLPNCKAVDIGPGLNLLQEDNPDLIGSEIARWLSTLEISG

SEQ ID NO: 2173 - protein, 277 aa, Synthetic construct
MFHYVDVGPRDGTPVLFLHGNPTSSYVWRNIIPHVAPTHRCIAPDLIGMGKSDKPDLGYFFDDHVRFMDAFIEALGLEEVVLVIHDWGSALGFHWAKRNPERVKGIAFMEFIRPIPTWDEWPEFARETFQAFRTTDVGRKLIIDQNVFIEGTLPMGVVRPLTEVEHDHYREPFLNPVDREPLWRFPNELPIAGEPANIVALVEEYMDWLHQSPVPKLLFWGTPGVLIPPAEAARLAKSLPNCKAVDIGPGLNLLQEDNPDLIGSEIARWLSTLEISG

SEQ ID NO: 2174 - protein, 277 aa, Synthetic construct
MFHYVDVGPRDGTPVLFLHGNPTSSYVWRNIIPHVAPTHRCIAPDLIGMGKSDKPDLGYFFDDHVRFMDAFIEALGLEEVVLVIHDWGSALGFHWAKRNPERVKGIAFMEFIRPIPTWDEWPEFARETFQAFRTTDVGRKLIIDQNVFIEGTLPMGVVRPLTEVEVDHYREPFLNPVDREPLWRFPNELPIAGEPANIVALVEEYMDWLHQSPVPKLLFWGTPGVLIPPAEAARLAKSLPNCKAVDIGPGLNLLQEDNPDLIGSEIARWLSTLEISG

SEQ ID NO: 2175 - protein, 277 aa, Synthetic construct
MFHYVDVGPRDGTPVLFLHGNPTSSYVWRNIIPHVAPTHRCIAPDLIGMGKSDKPDLGYFFDDHVRFMDAFIEALGLEEVVLVIHDWGSALGFHWAKRNPERVKGIAFMEFIRPIPTWDEWPEFARETFQAFRTTDVGRKLIIDQNVFIEGTLPMGVVRPLTEVEMAHYREPFLNPVDREPLWRFPNELPIAGEPANIVALVEEYMDWLHQSPVPKLLFWGTPGVLIPPAEAARLAKSLPNCKAVDIGPGLNLLQEDNPDLIGSEIARWLSTLEISG

SEQ ID NO: 2176 - protein, 277 aa, Synthetic construct
MFHYVDVGPRDGTPVLFLHGNPTSSYVWRNIIPHVAPTHRCIAPDLIGMGKSDKPDLGYFFDDHVRFMDAFIEALGLEEVVLVIHDWGSALGFHWAKRNPERVKGIAFMEFIRPIPTWDEWPEFARETFQAFRTTDVGRKLIIDQNVFIEGTLPMGVVRPLTEVEMEHYREPFLNPVDREPLWRFPNELPIAGEPANIVALVEEYMDWLHQSPVPKLLFWGTPGVLIPPAEAARLAKSLPNCKAVDIGPGLNLLQEDNPDLIGSEIARWLSTLEISG

SEQ ID NO: 2177 - protein, 277 aa, Synthetic construct
MFHYVDVGPRDGTPVLFLHGNPTSSYVWRNIIPHVAPTHRCIAPDLIGMGKSDKPDLGYFFDDHVRFMDAFIEALGLEEVVLVIHDWGSALGFHWAKRNPERVKGIAFMEFIRPIPTWDEWPEFARETFQAFRTTDVGRKLIIDQNVFIEGTLPMGVVRPLTEVEMQHYREPFLNPVDREPLWRFPNELPIAGEPANIVALVEEYMDWLHQSPVPKLLFWGTPGVLIPPAEAARLAKSLPNCKAVDIGPGLNLLQEDNPDLIGSEIARWLSTLEISG

SEQ ID NO: 2178 - protein, 277 aa, Synthetic construct
MFHYVDVGPRDGTPVLFLHGNPTSSYVWRNIIPHVAPTHRCIAPDLIGMGKSDKPDLGYFFDDHVRFMDAFIEALGLEEVVLVIHDWGSALGFHWAKRNPERVKGIAFMEFIRPIPTWDEWPEFARETFQAFRTTDVGRKLIIDQNVFIEGTLPMGVVRPLTEVEMRHYREPFLNPVDREPLWRFPNELPIAGEPANIVALVEEYMDWLHQSPVPKLLFWGTPGVLIPPAEAARLAKSLPNCKAVDIGPGLNLLQEDNPDLIGSEIARWLSTLEISG

SEQ ID NO: 2179 - protein, 277 aa, Synthetic construct
MFHYVDVGPRDGTPVLFLHGNPTSSYVWRNIIPHVAPTHRCIAPDLIGMGKSDKPDLGYFFDDHVRFMDAFIEALGLEEVVLVIHDWGSALGFHWAKRNPERVKGIAFMEFIRPIPTWDEWPEFARETFQAFRTTDVGRKLIIDQNVFIEGTLPMGVVRPLTEVEMKHYREPFLNPVDREPLWRFPNELPIAGEPANIVALVEEYMDWLHQSPVPKLLFWGTPGVLIPPAEAARLAKSLPNCKAVDIGPGLNLLQEDNPDLIGSEIARWLSTLEISG

SEQ ID NO: 2180 - protein, 277 aa, Synthetic construct
MFHYVDVGPRDGTPVLFLHGNPTSSYVWRNIIPHVAPTHRCIAPDLIGMGKSDKPDLGYFFDDHVRFMDAFIEALGLEEVVLVIHDWGSALGFHWAKRNPERVKGIAFMEFIRPIPTWDEWPEFARETFQAFRTTDVGRKLIIDQNVFIEGTLPMGVVRPLTEVEMNHYREPFLNPVDREPLWRFPNELPIAGEPANIVALVEEYMDWLHQSPVPKLLFWGTPGVLIPPAEAARLAKSLPNCKAVDIGPGLNLLQEDNPDLIGSEIARWLSTLEISG

SEQ ID NO: 2181 - protein, 277 aa, Synthetic construct
MFHYVDVGPRDGTPVLFLHGNPTSSYVWRNIIPHVAPTHRCIAPDLIGMGKSDKPDLGYFFDDHVRFMDAFIEALGLEEVVLVIHDWGSALGFHWAKRNPERVKGIAFMEFIRPIPTWDEWPEFARETFQAFRTTDVGRKLIIDQNVFIEGTLPMGVVRPLTEVEMDVYREPFLNPVDREPLWRFPNELPIAGEPANIVALVEEYMDWLHQSPVPKLLFWGTPGVLIPPAEAARLAKSLPNCKAVDIGPGLNLLQEDNPDLIGSEIARWLSTLEISG

SEQ ID NO: 2182 - protein, 277 aa, Synthetic construct
MFHYVDVGPRDGTPVLFLHGNPTSSYVWRNIIPHVAPTHRCIAPDLIGMGKSDKPDLGYFFDDHVRFMDAFIEALGLEEVVLVIHDWGSALGFHWAKRNPERVKGIAFMEFIRPIPTWDEWPEFARETFQAFRTTDVGRKLIIDQNVFIEGTLPMGVVRPLTEVEMDIYREPFLNPVDREPLWRFPNELPIAGEPANIVALVEEYMDWLHQSPVPKLLFWGTPGVLIPPAEAARLAKSLPNCKAVDIGPGLNLLQEDNPDLIGSEIARWLSTLEISG

SEQ ID NO: 2183 - protein, 277 aa, Synthetic construct
MFHYVDVGPRDGTPVLFLHGNPTSSYVWRNIIPHVAPTHRCIAPDLIGMGKSDKPDLGYFFDDHVRFMDAFIEALGLEEVVLVIHDWGSALGFHWAKRNPERVKGIAFMEFIRPIPTWDEWPEFARETFQAFRTTDVGRKLIIDQNVFIEGTLPMGVVRPLTEVEMDRYREPFLNPVDREPLWRFPNELPIAGEPANIVALVEEYMDWLHQSPVPKLLFWGTPGVLIPPAEAARLAKSLPNCKAVDIGPGLNLLQEDNPDLIGSEIARWLSTLEISG

SEQ ID NO: 2184 - protein, 277 aa, Synthetic construct
MFHYVDVGPRDGTPVLFLHGNPTSSYVWRNIIPHVAPTHRCIAPDLIGMGKSDKPDLGYFFDDHVRFMDAFIEALGLEEVVLVIHDWGSALGFHWAKRNPERVKGIAFMEFIRPIPTWDEWPEFARETFQAFRTTDVGRKLIIDQNVFIEGTLPMGVVRPLTEVEMDLYREPFLNPVDREPLWRFPNELPIAGEPANIVALVEEYMDWLHQSPVPKLLFWGTPGVLIPPAEAARLAKSLPNCKAVDIGPGLNLLQEDNPDLIGSEIARWLSTLEISG

SEQ ID NO: 2185 - protein, 277 aa, Synthetic construct
MFHYVDVGPRDGTPVLFLHGNPTSSYVWRNIIPHVAPTHRCIAPDLIGMGKSDKPDLGYFFDDHVRFMDAFIEALGLEEVVLVIHDWGSALGFHWAKRNPERVKGIAFMEFIRPIPTWDEWPEFARETFQAFRTTDVGRKLIIDQNVFIEGTLPMGVVRPLTEVEMDTYREPFLNPVDREPLWRFPNELPIAGEPANIVALVEEYMDWLHQSPVPKLLFWGTPGVLIPPAEAARLAKSLPNCKAVDIGPGLNLLQEDNPDLIGSEIARWLSTLEISG

SEQ ID NO: 2186 - protein, 277 aa, Synthetic construct
MFHYVDVGPRDGTPVLFLHGNPTSSYVWRNIIPHVAPTHRCIAPDLIGMGKSDKPDLGYFFDDHVRFMDAFIEALGLEEVVLVIHDWGSALGFHWAKRNPERVKGIAFMEFIRPIPTWDEWPEFARETFQAFRTTDVGRKLIIDQNVFIEGTLPMGVVRPLTEVEMDHLREPFLNPVDREPLWRFPNELPIAGEPANIVALVEEYMDWLHQSPVPKLLFWGTPGVLIPPAEAARLAKSLPNCKAVDIGPGLNLLQEDNPDLIGSEIARWLSTLEISG

SEQ ID NO: 2187 - protein, 277 aa, Synthetic construct
MFHYVDVGPRDGTPVLFLHGNPTSSYVWRNIIPHVAPTHRCIAPDLIGMGKSDKPDLGYFFDDHVRFMDAFIEALGLEEVVLVIHDWGSALGFHWAKRNPERVKGIAFMEFIRPIPTWDEWPEFARETFQAFRTTDVGRKLIIDQNVFIEGTLPMGVVRPLTEVEMDHWREPFLNPVDREPLWRFPNELPIAGEPANIVALVEEYMDWLHQSPVPKLLFWGTPGVLIPPAEAARLAKSLPNCKAVDIGPGLNLLQEDNPDLIGSEIARWLSTLEISG

SEQ ID NO: 2188 - protein, 277 aa, Synthetic construct
MFHYVDVGPRDGTPVLFLHGNPTSSYVWRNIIPHVAPTHRCIAPDLIGMGKSDKPDLGYFFDDHVRFMDAFIEALGLEEVVLVIHDWGSALGFHWAKRNPERVKGIAFMEFIRPIPTWDEWPEFARETFQAFRTTDVGRKLIIDQNVFIEGTLPMGVVRPLTEVEMDHHREPFLNPVDREPLWRFPNELPIAGEPANIVALVEEYMDWLHQSPVPKLLFWGTPGVLIPPAEAARLAKSLPNCKAVDIGPGLNLLQEDNPDLIGSEIARWLSTLEISG

SEQ ID NO: 2189 - protein, 277 aa, Synthetic construct
MFHYVDVGPRDGTPVLFLHGNPTSSYVWRNIIPHVAPTHRCIAPDLIGMGKSDKPDLGYFFDDHVRFMDAFIEALGLEEVVLVIHDWGSALGFHWAKRNPERVKGIAFMEFIRPIPTWDEWPEFARETFQAFRTTDVGRKLIIDQNVFIEGTLPMGVVRPLTEVEMDHCREPFLNPVDREPLWRFPNELPIAGEPANIVALVEEYMDWLHQSPVPKLLFWGTPGVLIPPAEAARLAKSLPNCKAVDIGPGLNLLQEDNPDLIGSEIARWLSTLEISG

SEQ ID NO: 2190 - protein, 277 aa, Synthetic construct
MFHYVDVGPRDGTPVLFLHGNPTSSYVWRNIIPHVAPTHRCIAPDLIGMGKSDKPDLGYFFDDHVRFMDAFIEALGLEEVVLVIHDWGSALGFHWAKRNPERVKGIAFMEFIRPIPTWDEWPEFARETFQAFRTTDVGRKLIIDQNVFIEGTLPMGVVRPLTEVEMDHIREPFLNPVDREPLWRFPNELPIAGEPANIVALVEEYMDWLHQSPVPKLLFWGTPGVLIPPAEAARLAKSLPNCKAVDIGPGLNLLQEDNPDLIGSEIARWLSTLEISG

SEQ ID NO: 2191 - protein, 277 aa, Synthetic construct
MFHYVDVGPRDGTPVLFLHGNPTSSYVWRNIIPHVAPTHRCIAPDLIGMGKSDKPDLGYFFDDHVRFMDAFIEALGLEEVVLVIHDWGSALGFHWAKRNPERVKGIAFMEFIRPIPTWDEWPEFARETFQAFRTTDVGRKLIIDQNVFIEGTLPMGVVRPLTEVEMDHYKEPFLNPVDREPLWRFPNELPIAGEPANIVALVEEYMDWLHQSPVPKLLFWGTPGVLIPPAEAARLAKSLPNCKAVDIGPGLNLLQEDNPDLIGSEIARWLSTLEISG

SEQ ID NO: 2192 - protein, 277 aa, Synthetic construct
MFHYVDVGPRDGTPVLFLHGNPTSSYVWRNIIPHVAPTHRCIAPDLIGMGKSDKPDLGYFFDDHVRFMDAFIEALGLEEVVLVIHDWGSALGFHWAKRNPERVKGIAFMEFIRPIPTWDEWPEFARETFQAFRTTDVGRKLIIDQNVFIEGTLPMGVVRPLTEVEMDHYLEPFLNPVDREPLWRFPNELPIAGEPANIVALVEEYMDWLHQSPVPKLLFWGTPGVLIPPAEAARLAKSLPNCKAVDIGPGLNLLQEDNPDLIGSEIARWLSTLEISG

SEQ ID NO: 2193 - protein, 277 aa, Synthetic construct
MFHYVDVGPRDGTPVLFLHGNPTSSYVWRNIIPHVAPTHRCIAPDLIGMGKSDKPDLGYFFDDHVRFMDAFIEALGLEEVVLVIHDWGSALGFHWAKRNPERVKGIAFMEFIRPIPTWDEWPEFARETFQAFRTTDVGRKLIIDQNVFIEGTLPMGVVRPLTEVEMDHYHEPFLNPVDREPLWRFPNELPIAGEPANIVALVEEYMDWLHQSPVPKLLFWGTPGVLIPPAEAARLAKSLPNCKAVDIGPGLNLLQEDNPDLIGSEIARWLSTLEISG

SEQ ID NO: 2194 - protein, 277 aa, Synthetic construct
MFHYVDVGPRDGTPVLFLHGNPTSSYVWRNIIPHVAPTHRCIAPDLIGMGKSDKPDLGYFFDDHVRFMDAFIEALGLEEVVLVIHDWGSALGFHWAKRNPERVKGIAFMEFIRPIPTWDEWPEFARETFQAFRTTDVGRKLIIDQNVFIEGTLPMGVVRPLTEVEMDHYQEPFLNPVDREPLWRFPNELPIAGEPANIVALVEEYMDWLHQSPVPKLLFWGTPGVLIPPAEAARLAKSLPNCKAVDIGPGLNLLQEDNPDLIGSEIARWLSTLEISG

SEQ ID NO: 2195 - protein, 277 aa, Synthetic construct
MFHYVDVGPRDGTPVLFLHGNPTSSYVWRNIIPHVAPTHRCIAPDLIGMGKSDKPDLGYFFDDHVRFMDAFIEALGLEEVVLVIHDWGSALGFHWAKRNPERVKGIAFMEFIRPIPTWDEWPEFARETFQAFRTTDVGRKLIIDQNVFIEGTLPMGVVRPLTEVEMDHYAEPFLNPVDREPLWRFPNELPIAGEPANIVALVEEYMDWLHQSPVPKLLFWGTPGVLIPPAEAARLAKSLPNCKAVDIGPGLNLLQEDNPDLIGSEIARWLSTLEISG

SEQ ID NO: 2196 - protein, 277 aa, Synthetic construct
MFHYVDVGPRDGTPVLFLHGNPTSSYVWRNIIPHVAPTHRCIAPDLIGMGKSDKPDLGYFFDDHVRFMDAFIEALGLEEVVLVIHDWGSALGFHWAKRNPERVKGIAFMEFIRPIPTWDEWPEFARETFQAFRTTDVGRKLIIDQNVFIEGTLPMGVVRPLTEVEMDHYVEPFLNPVDREPLWRFPNELPIAGEPANIVALVEEYMDWLHQSPVPKLLFWGTPGVLIPPAEAARLAKSLPNCKAVDIGPGLNLLQEDNPDLIGSEIARWLSTLEISG

SEQ ID NO: 2197 - protein, 277 aa, Synthetic construct
MFHYVDVGPRDGTPVLFLHGNPTSSYVWRNIIPHVAPTHRCIAPDLIGMGKSDKPDLGYFFDDHVRFMDAFIEALGLEEVVLVIHDWGSALGFHWAKRNPERVKGIAFMEFIRPIPTWDEWPEFARETFQAFRTTDVGRKLIIDQNVFIEGTLPMGVVRPLTEVEMDHYRRPFLNPVDREPLWRFPNELPIAGEPANIVALVEEYMDWLHQSPVPKLLFWGTPGVLIPPAEAARLAKSLPNCKAVDIGPGLNLLQEDNPDLIGSEIARWLSTLEISG

SEQ ID NO: 2198 - protein, 277 aa, Synthetic construct
MFHYVDVGPRDGTPVLFLHGNPTSSYVWRNIIPHVAPTHRCIAPDLIGMGKSDKPDLGYFFDDHVRFMDAFIEALGLEEVVLVIHDWGSALGFHWAKRNPERVKGIAFMEFIRPIPTWDEWPEFARETFQAFRTTDVGRKLIIDQNVFIEGTLPMGVVRPLTEVEMDHYRKPFLNPVDREPLWRFPNELPIAGEPANIVALVEEYMDWLHQSPVPKLLFWGTPGVLIPPAEAARLAKSLPNCKAVDIGPGLNLLQEDNPDLIGSEIARWLSTLEISG

SEQ ID NO: 2199 - protein, 277 aa, Synthetic construct
MFHYVDVGPRDGTPVLFLHGNPTSSYVWRNIIPHVAPTHRCIAPDLIGMGKSDKPDLGYFFDDHVRFMDAFIEALGLEEVVLVIHDWGSALGFHWAKRNPERVKGIAFMEFIRPIPTWDEWPEFARETFQAFRTTDVGRKLIIDQNVFIEGTLPMGVVRPLTEVEMDHYRQPFLNPVDREPLWRFPNELPIAGEPANIVALVEEYMDWLHQSPVPKLLFWGTPGVLIPPAEAARLAKSLPNCKAVDIGPGLNLLQEDNPDLIGSEIARWLSTLEISG

SEQ ID NO: 2200 - protein, 277 aa, Synthetic construct
MFHYVDVGPRDGTPVLFLHGNPTSSYVWRNIIPHVAPTHRCIAPDLIGMGKSDKPDLGYFFDDHVRFMDAFIEALGLEEVVLVIHDWGSALGFHWAKRNPERVKGIAFMEFIRPIPTWDEWPEFARETFQAFRTTDVGRKLIIDQNVFIEGTLPMGVVRPLTEVEMDHYRSPFLNPVDREPLWRFPNELPIAGEPANIVALVEEYMDWLHQSPVPKLLFWGTPGVLIPPAEAARLAKSLPNCKAVDIGPGLNLLQEDNPDLIGSEIARWLSTLEISG

SEQ ID NO: 2201 - protein, 277 aa, Synthetic construct
MFHYVDVGPRDGTPVLFLHGNPTSSYVWRNIIPHVAPTHRCIAPDLIGMGKSDKPDLGYFFDDHVRFMDAFIEALGLEEVVLVIHDWGSALGFHWAKRNPERVKGIAFMEFIRPIPTWDEWPEFARETFQAFRTTDVGRKLIIDQNVFIEGTLPMGVVRPLTEVEMDHYRTPFLNPVDREPLWRFPNELPIAGEPANIVALVEEYMDWLHQSPVPKLLFWGTPGVLIPPAEAARLAKSLPNCKAVDIGPGLNLLQEDNPDLIGSEIARWLSTLEISG

SEQ ID NO: 2202 - protein, 277 aa, Synthetic construct
MFHYVDVGPRDGTPVLFLHGNPTSSYVWRNIIPHVAPTHRCIAPDLIGMGKSDKPDLGYFFDDHVRFMDAFIEALGLEEVVLVIHDWGSALGFHWAKRNPERVKGIAFMEFIRPIPTWDEWPEFARETFQAFRTTDVGRKLIIDQNVFIEGTLPMGVVRPLTEVEMDHYREVFLNPVDREPLWRFPNELPIAGEPANIVALVEEYMDWLHQSPVPKLLFWGTPGVLIPPAEAARLAKSLPNCKAVDIGPGLNLLQEDNPDLIGSEIARWLSTLEISG

SEQ ID NO: 2203 - protein, 277 aa, Synthetic construct
MFHYVDVGPRDGTPVLFLHGNPTSSYVWRNIIPHVAPTHRCIAPDLIGMGKSDKPDLGYFFDDHVRFMDAFIEALGLEEVVLVIHDWGSALGFHWAKRNPERVKGIAFMEFIRPIPTWDEWPEFARETFQAFRTTDVGRKLIIDQNVFIEGTLPMGVVRPLTEVEMDHYRESFLNPVDREPLWRFPNELPIAGEPANIVALVEEYMDWLHQSPVPKLLFWGTPGVLIPPAEAARLAKSLPNCKAVDIGPGLNLLQEDNPDLIGSEIARWLSTLEISG

SEQ ID NO: 2204 - protein, 277 aa, Synthetic construct
MFHYVDVGPRDGTPVLFLHGNPTSSYVWRNIIPHVAPTHRCIAPDLIGMGKSDKPDLGYFFDDHVRFMDAFIEALGLEEVVLVIHDWGSALGFHWAKRNPERVKGIAFMEFIRPIPTWDEWPEFARETFQAFRTTDVGRKLIIDQNVFIEGTLPMGVVRPLTEVEMDHYRETFLNPVDREPLWRFPNELPIAGEPANIVALVEEYMDWLHQSPVPKLLFWGTPGVLIPPAEAARLAKSLPNCKAVDIGPGLNLLQEDNPDLIGSEIARWLSTLEISG

SEQ ID NO: 2205 - protein, 277 aa, Synthetic construct
MFHYVDVGPRDGTPVLFLHGNPTSSYVWRNIIPHVAPTHRCIAPDLIGMGKSDKPDLGYFFDDHVRFMDAFIEALGLEEVVLVIHDWGSALGFHWAKRNPERVKGIAFMEFIRPIPTWDEWPEFARETFQAFRTTDVGRKLIIDQNVFIEGTLPMGVVRPLTEVEMDHYRELFLNPVDREPLWRFPNELPIAGEPANIVALVEEYMDWLHQSPVPKLLFWGTPGVLIPPAEAARLAKSLPNCKAVDIGPGLNLLQEDNPDLIGSEIARWLSTLEISG

SEQ ID NO: 2206 - protein, 277 aa, Synthetic construct
MFHYVDVGPRDGTPVLFLHGNPTSSYVWRNIIPHVAPTHRCIAPDLIGMGKSDKPDLGYFFDDHVRFMDAFIEALGLEEVVLVIHDWGSALGFHWAKRNPERVKGIAFMEFIRPIPTWDEWPEFARETFQAFRTTDVGRKLIIDQNVFIEGTLPMGVVRPLTEVEMDHYREHFLNPVDREPLWRFPNELPIAGEPANIVALVEEYMDWLHQSPVPKLLFWGTPGVLIPPAEAARLAKSLPNCKAVDIGPGLNLLQEDNPDLIGSEIARWLSTLEISG

SEQ ID NO: 2207 - protein, 277 aa, Synthetic construct
MFHYVDVGPRDGTPVLFLHGNPTSSYVWRNIIPHVAPTHRCIAPDLIGMGKSDKPDLGYFFDDHVRFMDAFIEALGLEEVVLVIHDWGSALGFHWAKRNPERVKGIAFMEFIRPIPTWDEWPEFARETFQAFRTTDVGRKLIIDQNVFIEGTLPMGVVRPLTEVEMDHYREPWLNPVDREPLWRFPNELPIAGEPANIVALVEEYMDWLHQSPVPKLLFWGTPGVLIPPAEAARLAKSLPNCKAVDIGPGLNLLQEDNPDLIGSEIARWLSTLEISG

SEQ ID NO: 2208 - protein, 277 aa, Synthetic construct
MFHYVDVGPRDGTPVLFLHGNPTSSYVWRNIIPHVAPTHRCIAPDLIGMGKSDKPDLGYFFDDHVRFMDAFIEALGLEEVVLVIHDWGSALGFHWAKRNPERVKGIAFMEFIRPIPTWDEWPEFARETFQAFRTTDVGRKLIIDQNVFIEGTLPMGVVRPLTEVEMDHYREPLLNPVDREPLWRFPNELPIAGEPANIVALVEEYMDWLHQSPVPKLLFWGTPGVLIPPAEAARLAKSLPNCKAVDIGPGLNLLQEDNPDLIGSEIARWLSTLEISG

SEQ ID NO: 2209 - protein, 277 aa, Synthetic construct
MFHYVDVGPRDGTPVLFLHGNPTSSYVWRNIIPHVAPTHRCIAPDLIGMGKSDKPDLGYFFDDHVRFMDAFIEALGLEEVVLVIHDWGSALGFHWAKRNPERVKGIAFMEFIRPIPTWDEWPEFARETFQAFRTTDVGRKLIIDQNVFIEGTLPMGVVRPLTEVEMDHYREPMLNPVDREPLWRFPNELPIAGEPANIVALVEEYMDWLHQSPVPKLLFWGTPGVLIPPAEAARLAKSLPNCKAVDIGPGLNLLQEDNPDLIGSEIARWLSTLEISG

SEQ ID NO: 2210 - protein, 277 aa, Synthetic construct
MFHYVDVGPRDGTPVLFLHGNPTSSYVWRNIIPHVAPTHRCIAPDLIGMGKSDKPDLGYFFDDHVRFMDAFIEALGLEEVVLVIHDWGSALGFHWAKRNPERVKGIAFMEFIRPIPTWDEWPEFARETFQAFRTTDVGRKLIIDQNVFIEGTLPMGVVRPLTEVEMDHYREPHLNPVDREPLWRFPNELPIAGEPANIVALVEEYMDWLHQSPVPKLLFWGTPGVLIPPAEAARLAKSLPNCKAVDIGPGLNLLQEDNPDLIGSEIARWLSTLEISG

SEQ ID NO: 2211 - protein, 277 aa, Synthetic construct
MFHYVDVGPRDGTPVLFLHGNPTSSYVWRNIIPHVAPTHRCIAPDLIGMGKSDKPDLGYFFDDHVRFMDAFIEALGLEEVVLVIHDWGSALGFHWAKRNPERVKGIAFMEFIRPIPTWDEWPEFARETFQAFRTTDVGRKLIIDQNVFIEGTLPMGVVRPLTEVEMDHYREPVLNPVDREPLWRFPNELPIAGEPANIVALVEEYMDWLHQSPVPKLLFWGTPGVLIPPAEAARLAKSLPNCKAVDIGPGLNLLQEDNPDLIGSEIARWLSTLEISG

SEQ ID NO: 2212 - protein, 277 aa, Synthetic construct
MFHYVDVGPRDGTPVLFLHGNPTSSYVWRNIIPHVAPTHRCIAPDLIGMGKSDKPDLGYFFDDHVRFMDAFIEALGLEEVVLVIHDWGSALGFHWAKRNPERVKGIAFMEFIRPIPTWDEWPEFARETFQAFRTTDVGRKLIIDQNVFIEGTLPMGVVRPLTEVEMDHYREPFRNPVDREPLWRFPNELPIAGEPANIVALVEEYMDWLHQSPVPKLLFWGTPGVLIPPAEAARLAKSLPNCKAVDIGPGLNLLQEDNPDLIGSEIARWLSTLEISG

SEQ ID NO: 2213 - protein, 277 aa, Synthetic construct
MFHYVDVGPRDGTPVLFLHGNPTSSYVWRNIIPHVAPTHRCIAPDLIGMGKSDKPDLGYFFDDHVRFMDAFIEALGLEEVVLVIHDWGSALGFHWAKRNPERVKGIAFMEFIRPIPTWDEWPEFARETFQAFRTTDVGRKLIIDQNVFIEGTLPMGVVRPLTEVEMDHYREPFPNPVDREPLWRFPNELPIAGEPANIVALVEEYMDWLHQSPVPKLLFWGTPGVLIPPAEAARLAKSLPNCKAVDIGPGLNLLQEDNPDLIGSEIARWLSTLEISG

SEQ ID NO: 2214 - protein, 277 aa, Synthetic construct
MFHYVDVGPRDGTPVLFLHGNPTSSYVWRNIIPHVAPTHRCIAPDLIGMGKSDKPDLGYFFDDHVRFMDAFIEALGLEEVVLVIHDWGSALGFHWAKRNPERVKGIAFMEFIRPIPTWDEWPEFARETFQAFRTTDVGRKLIIDQNVFIEGTLPMGVVRPLTEVEMDHYREPFANPVDREPLWRFPNELPIAGEPANIVALVEEYMDWLHQSPVPKLLFWGTPGVLIPPAEAARLAKSLPNCKAVDIGPGLNLLQEDNPDLIGSEIARWLSTLEISG

SEQ ID NO: 2215 - protein, 277 aa, Synthetic construct
MFHYVDVGPRDGTPVLFLHGNPTSSYVWRNIIPHVAPTHRCIAPDLIGMGKSDKPDLGYFFDDHVRFMDAFIEALGLEEVVLVIHDWGSALGFHWAKRNPERVKGIAFMEFIRPIPTWDEWPEFARETFQAFRTTDVGRKLIIDQNVFIEGTLPMGVVRPLTEVEMDHYREPFVNPVDREPLWRFPNELPIAGEPANIVALVEEYMDWLHQSPVPKLLFWGTPGVLIPPAEAARLAKSLPNCKAVDIGPGLNLLQEDNPDLIGSEIARWLSTLEISG

SEQ ID NO: 2216 - protein, 277 aa, Synthetic construct
MFHYVDVGPRDGTPVLFLHGNPTSSYVWRNIIPHVAPTHRCIAPDLIGMGKSDKPDLGYFFDDHVRFMDAFIEALGLEEVVLVIHDWGSALGFHWAKRNPERVKGIAFMEFIRPIPTWDEWPEFARETFQAFRTTDVGRKLIIDQNVFIEGTLPMGVVRPLTEVEMDHYREPFSNPVDREPLWRFPNELPIAGEPANIVALVEEYMDWLHQSPVPKLLFWGTPGVLIPPAEAARLAKSLPNCKAVDIGPGLNLLQEDNPDLIGSEIARWLSTLEISG

SEQ ID NO: 2217 - protein, 277 aa, Synthetic construct
MFHYVDVGPRDGTPVLFLHGNPTSSYVWRNIIPHVAPTHRCIAPDLIGMGKSDKPDLGYFFDDHVRFMDAFIEALGLEEVVLVIHDWGSALGFHWAKRNPERVKGIAFMEFIRPIPTWDEWPEFARETFQAFRTTDVGRKLIIDQNVFIEGTLPMGVVRPLTEVEMDHYREPFTNPVDREPLWRFPNELPIAGEPANIVALVEEYMDWLHQSPVPKLLFWGTPGVLIPPAEAARLAKSLPNCKAVDIGPGLNLLQEDNPDLIGSEIARWLSTLEISG

SEQ ID NO: 2218 - protein, 277 aa, Synthetic construct
MFHYVDVGPRDGTPVLFLHGNPTSSYVWRNIIPHVAPTHRCIAPDLIGMGKSDKPDLGYFFDDHVRFMDAFIEALGLEEVVLVIHDWGSALGFHWAKRNPERVKGIAFMEFIRPIPTWDEWPEFARETFQAFRTTDVGRKLIIDQNVFIEGTLPMGVVRPLTEVEMDHYREPFLTPVDREPLWRFPNELPIAGEPANIVALVEEYMDWLHQSPVPKLLFWGTPGVLIPPAEAARLAKSLPNCKAVDIGPGLNLLQEDNPDLIGSEIARWLSTLEISG

SEQ ID NO: 2219 - protein, 277 aa, Synthetic construct
MFHYVDVGPRDGTPVLFLHGNPTSSYVWRNIIPHVAPTHRCIAPDLIGMGKSDKPDLGYFFDDHVRFMDAFIEALGLEEVVLVIHDWGSALGFHWAKRNPERVKGIAFMEFIRPIPTWDEWPEFARETFQAFRTTDVGRKLIIDQNVFIEGTLPMGVVRPLTEVEMDHYREPFLSPVDREPLWRFPNELPIAGEPANIVALVEEYMDWLHQSPVPKLLFWGTPGVLIPPAEAARLAKSLPNCKAVDIGPGLNLLQEDNPDLIGSEIARWLSTLEISG

SEQ ID NO: 2220 - protein, 277 aa, Synthetic construct
MFHYVDVGPRDGTPVLFLHGNPTSSYVWRNIIPHVAPTHRCIAPDLIGMGKSDKPDLGYFFDDHVRFMDAFIEALGLEEVVLVIHDWGSALGFHWAKRNPERVKGIAFMEFIRPIPTWDEWPEFARETFQAFRTTDVGRKLIIDQNVFIEGTLPMGVVRPLTEVEMDHYREPFLDPVDREPLWRFPNELPIAGEPANIVALVEEYMDWLHQSPVPKLLFWGTPGVLIPPAEAARLAKSLPNCKAVDIGPGLNLLQEDNPDLIGSEIARWLSTLEISG

SEQ ID NO: 2221 - protein, 277 aa, Synthetic construct
MFHYVDVGPRDGTPVLFLHGNPTSSYVWRNIIPHVAPTHRCIAPDLIGMGKSDKPDLGYFFDDHVRFMDAFIEALGLEEVVLVIHDWGSALGFHWAKRNPERVKGIAFMEFIRPIPTWDEWPEFARETFQAFRTTDVGRKLIIDQNVFIEGTLPMGVVRPLTEVEMDHYREPFLKPVDREPLWRFPNELPIAGEPANIVALVEEYMDWLHQSPVPKLLFWGTPGVLIPPAEAARLAKSLPNCKAVDIGPGLNLLQEDNPDLIGSEIARWLSTLEISG

SEQ ID NO: 2222 - protein, 277 aa, Synthetic construct
MFHYVDVGPRDGTPVLFLHGNPTSSYVWRNIIPHVAPTHRCIAPDLIGMGKSDKPDLGYFFDDHVRFMDAFIEALGLEEVVLVIHDWGSALGFHWAKRNPERVKGIAFMEFIRPIPTWDEWPEFARETFQAFRTTDVGRKLIIDQNVFIEGTLPMGVVRPLTEVEMDHYREPFLRPVDREPLWRFPNELPIAGEPANIVALVEEYMDWLHQSPVPKLLFWGTPGVLIPPAEAARLAKSLPNCKAVDIGPGLNLLQEDNPDLIGSEIARWLSTLEISG

SEQ ID NO: 2223 - protein, 277 aa, Synthetic construct
MFHYVDVGPRDGTPVLFLHGNPTSSYVWRNIIPHVAPTHRCIAPDLIGMGKSDKPDLGYFFDDHVRFMDAFIEALGLEEVVLVIHDWGSALGFHWAKRNPERVKGIAFMEFIRPIPTWDEWPEFARETFQAFRTTDVGRKLIIDQNVFIEGTLPMGVVRPLTEVEMDHYREPFLAPVDREPLWRFPNELPIAGEPANIVALVEEYMDWLHQSPVPKLLFWGTPGVLIPPAEAARLAKSLPNCKAVDIGPGLNLLQEDNPDLIGSEIARWLSTLEISG

SEQ ID NO: 2224 - protein, 277 aa, Synthetic construct
MFHYVDVGPRDGTPVLFLHGNPTSSYVWRNIIPHVAPTHRCIAPDLIGMGKSDKPDLGYFFDDHVRFMDAFIEALGLEEVVLVIHDWGSALGFHWAKRNPERVKGIAFMEFIRPIPTWDEWPEFARETFQAFRTTDVGRKLIIDQNVFIEGTLPMGVVRPLTEVEMDHYREPFLNAVDREPLWRFPNELPIAGEPANIVALVEEYMDWLHQSPVPKLLFWGTPGVLIPPAEAARLAKSLPNCKAVDIGPGLNLLQEDNPDLIGSEIARWLSTLEISG

SEQ ID NO: 2225 - protein, 277 aa, Synthetic construct
MFHYVDVGPRDGTPVLFLHGNPTSSYVWRNIIPHVAPTHRCIAPDLIGMGKSDKPDLGYFFDDHVRFMDAFIEALGLEEVVLVIHDWGSALGFHWAKRNPERVKGIAFMEFIRPIPTWDEWPEFARETFQAFRTTDVGRKLIIDQNVFIEGTLPMGVVRPLTEVEMDHYREPFLNEVDREPLWRFPNELPIAGEPANIVALVEEYMDWLHQSPVPKLLFWGTPGVLIPPAEAARLAKSLPNCKAVDIGPGLNLLQEDNPDLIGSEIARWLSTLEISG

SEQ ID NO: 2226 - protein, 277 aa, Synthetic construct
MFHYVDVGPRDGTPVLFLHGNPTSSYVWRNIIPHVAPTHRCIAPDLIGMGKSDKPDLGYFFDDHVRFMDAFIEALGLEEVVLVIHDWGSALGFHWAKRNPERVKGIAFMEFIRPIPTWDEWPEFARETFQAFRTTDVGRKLIIDQNVFIEGTLPMGVVRPLTEVEMDHYREPFLNRVDREPLWRFPNELPIAGEPANIVALVEEYMDWLHQSPVPKLLFWGTPGVLIPPAEAARLAKSLPNCKAVDIGPGLNLLQEDNPDLIGSEIARWLSTLEISG

SEQ ID NO: 2227 - protein, 277 aa, Synthetic construct
MFHYVDVGPRDGTPVLFLHGNPTSSYVWRNIIPHVAPTHRCIAPDLIGMGKSDKPDLGYFFDDHVRFMDAFIEALGLEEVVLVIHDWGSALGFHWAKRNPERVKGIAFMEFIRPIPTWDEWPEFARETFQAFRTTDVGRKLIIDQNVFIEGTLPMGVVRPLTEVEMDHYREPFLNKVDREPLWRFPNELPIAGEPANIVALVEEYMDWLHQSPVPKLLFWGTPGVLIPPAEAARLAKSLPNCKAVDIGPGLNLLQEDNPDLIGSEIARWLSTLEISG

SEQ ID NO: 2228 - protein, 277 aa, Synthetic construct
MFHYVDVGPRDGTPVLFLHGNPTSSYVWRNIIPHVAPTHRCIAPDLIGMGKSDKPDLGYFFDDHVRFMDAFIEALGLEEVVLVIHDWGSALGFHWAKRNPERVKGIAFMEFIRPIPTWDEWPEFARETFQAFRTTDVGRKLIIDQNVFIEGTLPMGVVRPLTEVEMDHYREPFLNSVDREPLWRFPNELPIAGEPANIVALVEEYMDWLHQSPVPKLLFWGTPGVLIPPAEAARLAKSLPNCKAVDIGPGLNLLQEDNPDLIGSEIARWLSTLEISG

SEQ ID NO: 2229 - protein, 277 aa, Synthetic construct
MFHYVDVGPRDGTPVLFLHGNPTSSYVWRNIIPHVAPTHRCIAPDLIGMGKSDKPDLGYFFDDHVRFMDAFIEALGLEEVVLVIHDWGSALGFHWAKRNPERVKGIAFMEFIRPIPTWDEWPEFARETFQAFRTTDVGRKLIIDQNVFIEGTLPMGVVRPLTEVEMDHYREPFLNDVDREPLWRFPNELPIAGEPANIVALVEEYMDWLHQSPVPKLLFWGTPGVLIPPAEAARLAKSLPNCKAVDIGPGLNLLQEDNPDLIGSEIARWLSTLEISG

SEQ ID NO: 2230 - protein, 277 aa, Synthetic construct
MFHYVDVGPRDGTPVLFLHGNPTSSYVWRNIIPHVAPTHRCIAPDLIGMGKSDKPDLGYFFDDHVRFMDAFIEALGLEEVVLVIHDWGSALGFHWAKRNPERVKGIAFMEFIRPIPTWDEWPEFARETFQAFRTTDVGRKLIIDQNVFIEGTLPMGVVRPLTEVEMDHYREPFLNPADREPLWRFPNELPIAGEPANIVALVEEYMDWLHQSPVPKLLFWGTPGVLIPPAEAARLAKSLPNCKAVDIGPGLNLLQEDNPDLIGSEIARWLSTLEISG

SEQ ID NO: 2231 - protein, 277 aa, Synthetic construct
MFHYVDVGPRDGTPVLFLHGNPTSSYVWRNIIPHVAPTHRCIAPDLIGMGKSDKPDLGYFFDDHVRFMDAFIEALGLEEVVLVIHDWGSALGFHWAKRNPERVKGIAFMEFIRPIPTWDEWPEFARETFQAFRTTDVGRKLIIDQNVFIEGTLPMGVVRPLTEVEMDHYREPFLNPEDREPLWRFPNELPIAGEPANIVALVEEYMDWLHQSPVPKLLFWGTPGVLIPPAEAARLAKSLPNCKAVDIGPGLNLLQEDNPDLIGSEIARWLSTLEISG

SEQ ID NO: 2232 - protein, 277 aa, Synthetic construct
MFHYVDVGPRDGTPVLFLHGNPTSSYVWRNIIPHVAPTHRCIAPDLIGMGKSDKPDLGYFFDDHVRFMDAFIEALGLEEVVLVIHDWGSALGFHWAKRNPERVKGIAFMEFIRPIPTWDEWPEFARETFQAFRTTDVGRKLIIDQNVFIEGTLPMGVVRPLTEVEMDHYREPFLNPDDREPLWRFPNELPIAGEPANIVALVEEYMDWLHQSPVPKLLFWGTPGVLIPPAEAARLAKSLPNCKAVDIGPGLNLLQEDNPDLIGSEIARWLSTLEISG

SEQ ID NO: 2233 - protein, 277 aa, Synthetic construct
MFHYVDVGPRDGTPVLFLHGNPTSSYVWRNIIPHVAPTHRCIAPDLIGMGKSDKPDLGYFFDDHVRFMDAFIEALGLEEVVLVIHDWGSALGFHWAKRNPERVKGIAFMEFIRPIPTWDEWPEFARETFQAFRTTDVGRKLIIDQNVFIEGTLPMGVVRPLTEVEMDHYREPFLNPKDREPLWRFPNELPIAGEPANIVALVEEYMDWLHQSPVPKLLFWGTPGVLIPPAEAARLAKSLPNCKAVDIGPGLNLLQEDNPDLIGSEIARWLSTLEISG

SEQ ID NO: 2234 - protein, 277 aa, Synthetic construct
MFHYVDVGPRDGTPVLFLHGNPTSSYVWRNIIPHVAPTHRCIAPDLIGMGKSDKPDLGYFFDDHVRFMDAFIEALGLEEVVLVIHDWGSALGFHWAKRNPERVKGIAFMEFIRPIPTWDEWPEFARETFQAFRTTDVGRKLIIDQNVFIEGTLPMGVVRPLTEVEMDHYREPFLNPQDREPLWRFPNELPIAGEPANIVALVEEYMDWLHQSPVPKLLFWGTPGVLIPPAEAARLAKSLPNCKAVDIGPGLNLLQEDNPDLIGSEIARWLSTLEISG

SEQ ID NO: 2235 - protein, 277 aa, Synthetic construct
MFHYVDVGPRDGTPVLFLHGNPTSSYVWRNIIPHVAPTHRCIAPDLIGMGKSDKPDLGYFFDDHVRFMDAFIEALGLEEVVLVIHDWGSALGFHWAKRNPERVKGIAFMEFIRPIPTWDEWPEFARETFQAFRTTDVGRKLIIDQNVFIEGTLPMGVVRPLTEVEMDHYREPFLNPGDREPLWRFPNELPIAGEPANIVALVEEYMDWLHQSPVPKLLFWGTPGVLIPPAEAARLAKSLPNCKAVDIGPGLNLLQEDNPDLIGSEIARWLSTLEISG

SEQ ID NO: 2236 - protein, 277 aa, Synthetic construct
MFHYVDVGPRDGTPVLFLHGNPTSSYVWRNIIPHVAPTHRCIAPDLIGMGKSDKPDLGYFFDDHVRFMDAFIEALGLEEVVLVIHDWGSALGFHWAKRNPERVKGIAFMEFIRPIPTWDEWPEFARETFQAFRTTDVGRKLIIDQNVFIEGTLPMGVVRPLTEVEMDHYREPFLNPVSREPLWRFPNELPIAGEPANIVALVEEYMDWLHQSPVPKLLFWGTPGVLIPPAEAARLAKSLPNCKAVDIGPGLNLLQEDNPDLIGSEIARWLSTLEISG

SEQ ID NO: 2237 - protein, 277 aa, Synthetic construct
MFHYVDVGPRDGTPVLFLHGNPTSSYVWRNIIPHVAPTHRCIAPDLIGMGKSDKPDLGYFFDDHVRFMDAFIEALGLEEVVLVIHDWGSALGFHWAKRNPERVKGIAFMEFIRPIPTWDEWPEFARETFQAFRTTDVGRKLIIDQNVFIEGTLPMGVVRPLTEVEMDHYREPFLNPVAREPLWRFPNELPIAGEPANIVALVEEYMDWLHQSPVPKLLFWGTPGVLIPPAEAARLAKSLPNCKAVDIGPGLNLLQEDNPDLIGSEIARWLSTLEISG

SEQ ID NO: 2238 - protein, 277 aa, Synthetic construct
MFHYVDVGPRDGTPVLFLHGNPTSSYVWRNIIPHVAPTHRCIAPDLIGMGKSDKPDLGYFFDDHVRFMDAFIEALGLEEVVLVIHDWGSALGFHWAKRNPERVKGIAFMEFIRPIPTWDEWPEFARETFQAFRTTDVGRKLIIDQNVFIEGTLPMGVVRPLTEVEMDHYREPFLNPVTREPLWRFPNELPIAGEPANIVALVEEYMDWLHQSPVPKLLFWGTPGVLIPPAEAARLAKSLPNCKAVDIGPGLNLLQEDNPDLIGSEIARWLSTLEISG

SEQ ID NO: 2239 - protein, 277 aa, Synthetic construct
MFHYVDVGPRDGTPVLFLHGNPTSSYVWRNIIPHVAPTHRCIAPDLIGMGKSDKPDLGYFFDDHVRFMDAFIEALGLEEVVLVIHDWGSALGFHWAKRNPERVKGIAFMEFIRPIPTWDEWPEFARETFQAFRTTDVGRKLIIDQNVFIEGTLPMGVVRPLTEVEMDHYREPFLNPVNREPLWRFPNELPIAGEPANIVALVEEYMDWLHQSPVPKLLFWGTPGVLIPPAEAARLAKSLPNCKAVDIGPGLNLLQEDNPDLIGSEIARWLSTLEISG

SEQ ID NO: 2240 - protein, 277 aa, Synthetic construct
MFHYVDVGPRDGTPVLFLHGNPTSSYVWRNIIPHVAPTHRCIAPDLIGMGKSDKPDLGYFFDDHVRFMDAFIEALGLEEVVLVIHDWGSALGFHWAKRNPERVKGIAFMEFIRPIPTWDEWPEFARETFQAFRTTDVGRKLIIDQNVFIEGTLPMGVVRPLTEVEMDHYREPFLNPVEREPLWRFPNELPIAGEPANIVALVEEYMDWLHQSPVPKLLFWGTPGVLIPPAEAARLAKSLPNCKAVDIGPGLNLLQEDNPDLIGSEIARWLSTLEISG

SEQ ID NO: 2241 - protein, 277 aa, Synthetic construct
MFHYVDVGPRDGTPVLFLHGNPTSSYVWRNIIPHVAPTHRCIAPDLIGMGKSDKPDLGYFFDDHVRFMDAFIEALGLEEVVLVIHDWGSALGFHWAKRNPERVKGIAFMEFIRPIPTWDEWPEFARETFQAFRTTDVGRKLIIDQNVFIEGTLPMGVVRPLTEVEMDHYREPFLNPVGREPLWRFPNELPIAGEPANIVALVEEYMDWLHQSPVPKLLFWGTPGVLIPPAEAARLAKSLPNCKAVDIGPGLNLLQEDNPDLIGSEIARWLSTLEISG

SEQ ID NO: 2242 - protein, 277 aa, Synthetic construct
MFHYVDVGPRDGTPVLFLHGNPTSSYVWRNIIPHVAPTHRCIAPDLIGMGKSDKPDLGYFFDDHVRFMDAFIEALGLEEVVLVIHDWGSALGFHWAKRNPERVKGIAFMEFIRPIPTWDEWPEFARETFQAFRTTDVGRKLIIDQNVFIEGTLPMGVVRPLTEVEMDHYREPFLNPVDKEPLWRFPNELPIAGEPANIVALVEEYMDWLHQSPVPKLLFWGTPGVLIPPAEAARLAKSLPNCKAVDIGPGLNLLQEDNPDLIGSEIARWLSTLEISG

SEQ ID NO: 2243 - protein, 277 aa, Synthetic construct
MFHYVDVGPRDGTPVLFLHGNPTSSYVWRNIIPHVAPTHRCIAPDLIGMGKSDKPDLGYFFDDHVRFMDAFIEALGLEEVVLVIHDWGSALGFHWAKRNPERVKGIAFMEFIRPIPTWDEWPEFARETFQAFRTTDVGRKLIIDQNVFIEGTLPMGVVRPLTEVEMDHYREPFLNPVDQEPLWRFPNELPIAGEPANIVALVEEYMDWLHQSPVPKLLFWGTPGVLIPPAEAARLAKSLPNCKAVDIGPGLNLLQEDNPDLIGSEIARWLSTLEISG

SEQ ID NO: 2244 - protein, 277 aa, Synthetic construct
MFHYVDVGPRDGTPVLFLHGNPTSSYVWRNIIPHVAPTHRCIAPDLIGMGKSDKPDLGYFFDDHVRFMDAFIEALGLEEVVLVIHDWGSALGFHWAKRNPERVKGIAFMEFIRPIPTWDEWPEFARETFQAFRTTDVGRKLIIDQNVFIEGTLPMGVVRPLTEVEMDHYREPFLNPVDHEPLWRFPNELPIAGEPANIVALVEEYMDWLHQSPVPKLLFWGTPGVLIPPAEAARLAKSLPNCKAVDIGPGLNLLQEDNPDLIGSEIARWLSTLEISG

SEQ ID NO: 2245 - protein, 277 aa, Synthetic construct
MFHYVDVGPRDGTPVLFLHGNPTSSYVWRNIIPHVAPTHRCIAPDLIGMGKSDKPDLGYFFDDHVRFMDAFIEALGLEEVVLVIHDWGSALGFHWAKRNPERVKGIAFMEFIRPIPTWDEWPEFARETFQAFRTTDVGRKLIIDQNVFIEGTLPMGVVRPLTEVEMDHYREPFLNPVDLEPLWRFPNELPIAGEPANIVALVEEYMDWLHQSPVPKLLFWGTPGVLIPPAEAARLAKSLPNCKAVDIGPGLNLLQEDNPDLIGSEIARWLSTLEISG

SEQ ID NO: 2246 - protein, 277 aa, Synthetic construct
MFHYVDVGPRDGTPVLFLHGNPTSSYVWRNIIPHVAPTHRCIAPDLIGMGKSDKPDLGYFFDDHVRFMDAFIEALGLEEVVLVIHDWGSALGFHWAKRNPERVKGIAFMEFIRPIPTWDEWPEFARETFQAFRTTDVGRKLIIDQNVFIEGTLPMGVVRPLTEVEMDHYREPFLNPVDAEPLWRFPNELPIAGEPANIVALVEEYMDWLHQSPVPKLLFWGTPGVLIPPAEAARLAKSLPNCKAVDIGPGLNLLQEDNPDLIGSEIARWLSTLEISG

SEQ ID NO: 2247 - protein, 277 aa, Synthetic construct
MFHYVDVGPRDGTPVLFLHGNPTSSYVWRNIIPHVAPTHRCIAPDLIGMGKSDKPDLGYFFDDHVRFMDAFIEALGLEEVVLVIHDWGSALGFHWAKRNPERVKGIAFMEFIRPIPTWDEWPEFARETFQAFRTTDVGRKLIIDQNVFIEGTLPMGVVRPLTEVEMDHYREPFLNPVDCEPLWRFPNELPIAGEPANIVALVEEYMDWLHQSPVPKLLFWGTPGVLIPPAEAARLAKSLPNCKAVDIGPGLNLLQEDNPDLIGSEIARWLSTLEISG

SEQ ID NO: 2248 - protein, 277 aa, Synthetic construct
MFHYVDVGPRDGTPVLFLHGNPTSSYVWRNIIPHVAPTHRCIAPDLIGMGKSDKPDLGYFFDDHVRFMDAFIEALGLEEVVLVIHDWGSALGFHWAKRNPERVKGIAFMEFIRPIPTWDEWPEFARETFQAFRTTDVGRKLIIDQNVFIEGTLPMGVVRPLTEVEMDHYREPFLNPVDRAPLWRFPNELPIAGEPANIVALVEEYMDWLHQSPVPKLLFWGTPGVLIPPAEAARLAKSLPNCKAVDIGPGLNLLQEDNPDLIGSEIARWLSTLEISG

SEQ ID NO: 2249 - protein, 277 aa, Synthetic construct
MFHYVDVGPRDGTPVLFLHGNPTSSYVWRNIIPHVAPTHRCIAPDLIGMGKSDKPDLGYFFDDHVRFMDAFIEALGLEEVVLVIHDWGSALGFHWAKRNPERVKGIAFMEFIRPIPTWDEWPEFARETFQAFRTTDVGRKLIIDQNVFIEGTLPMGVVRPLTEVEMDHYREPFLNPVDRLPLWRFPNELPIAGEPANIVALVEEYMDWLHQSPVPKLLFWGTPGVLIPPAEAARLAKSLPNCKAVDIGPGLNLLQEDNPDLIGSEIARWLSTLEISG

SEQ ID NO: 2250 - protein, 277 aa, Synthetic construct
MFHYVDVGPRDGTPVLFLHGNPTSSYVWRNIIPHVAPTHRCIAPDLIGMGKSDKPDLGYFFDDHVRFMDAFIEALGLEEVVLVIHDWGSALGFHWAKRNPERVKGIAFMEFIRPIPTWDEWPEFARETFQAFRTTDVGRKLIIDQNVFIEGTLPMGVVRPLTEVEMDHYREPFLNPVDRKPLWRFPNELPIAGEPANIVALVEEYMDWLHQSPVPKLLFWGTPGVLIPPAEAARLAKSLPNCKAVDIGPGLNLLQEDNPDLIGSEIARWLSTLEISG

SEQ ID NO: 2251 - protein, 277 aa, Synthetic construct
MFHYVDVGPRDGTPVLFLHGNPTSSYVWRNIIPHVAPTHRCIAPDLIGMGKSDKPDLGYFFDDHVRFMDAFIEALGLEEVVLVIHDWGSALGFHWAKRNPERVKGIAFMEFIRPIPTWDEWPEFARETFQAFRTTDVGRKLIIDQNVFIEGTLPMGVVRPLTEVEMDHYREPFLNPVDRQPLWRFPNELPIAGEPANIVALVEEYMDWLHQSPVPKLLFWGTPGVLIPPAEAARLAKSLPNCKAVDIGPGLNLLQEDNPDLIGSEIARWLSTLEISG

SEQ ID NO: 2252 - protein, 277 aa, Synthetic construct
MFHYVDVGPRDGTPVLFLHGNPTSSYVWRNIIPHVAPTHRCIAPDLIGMGKSDKPDLGYFFDDHVRFMDAFIEALGLEEVVLVIHDWGSALGFHWAKRNPERVKGIAFMEFIRPIPTWDEWPEFARETFQAFRTTDVGRKLIIDQNVFIEGTLPMGVVRPLTEVEMDHYREPFLNPVDRVPLWRFPNELPIAGEPANIVALVEEYMDWLHQSPVPKLLFWGTPGVLIPPAEAARLAKSLPNCKAVDIGPGLNLLQEDNPDLIGSEIARWLSTLEISG

SEQ ID NO: 2253 - protein, 277 aa, Synthetic construct
MFHYVDVGPRDGTPVLFLHGNPTSSYVWRNIIPHVAPTHRCIAPDLIGMGKSDKPDLGYFFDDHVRFMDAFIEALGLEEVVLVIHDWGSALGFHWAKRNPERVKGIAFMEFIRPIPTWDEWPEFARETFQAFRTTDVGRKLIIDQNVFIEGTLPMGVVRPLTEVEMDHYREPFLNPVDRRPLWRFPNELPIAGEPANIVALVEEYMDWLHQSPVPKLLFWGTPGVLIPPAEAARLAKSLPNCKAVDIGPGLNLLQEDNPDLIGSEIARWLSTLEISG

SEQ ID NO: 2254 - protein, 277 aa, Synthetic construct
MFHYVDVGPRDGTPVLFLHGNPTSSYVWRNIIPHVAPTHRCIAPDLIGMGKSDKPDLGYFFDDHVRFMDAFIEALGLEEVVLVIHDWGSALGFHWAKRNPERVKGIAFMEFIRPIPTWDEWPEFARETFQAFRTTDVGRKLIIDQNVFIEGTLPMGVVRPLTEVEMDHYREPFLNPVDREALWRFPNELPIAGEPANIVALVEEYMDWLHQSPVPKLLFWGTPGVLIPPAEAARLAKSLPNCKAVDIGPGLNLLQEDNPDLIGSEIARWLSTLEISG

SEQ ID NO: 2255 - protein, 277 aa, Synthetic construct
MFHYVDVGPRDGTPVLFLHGNPTSSYVWRNIIPHVAPTHRCIAPDLIGMGKSDKPDLGYFFDDHVRFMDAFIEALGLEEVVLVIHDWGSALGFHWAKRNPERVKGIAFMEFIRPIPTWDEWPEFARETFQAFRTTDVGRKLIIDQNVFIEGTLPMGVVRPLTEVEMDHYREPFLNPVDRESLWRFPNELPIAGEPANIVALVEEYMDWLHQSPVPKLLFWGTPGVLIPPAEAARLAKSLPNCKAVDIGPGLNLLQEDNPDLIGSEIARWLSTLEISG

SEQ ID NO: 2256 - protein, 277 aa, Synthetic construct
MFHYVDVGPRDGTPVLFLHGNPTSSYVWRNIIPHVAPTHRCIAPDLIGMGKSDKPDLGYFFDDHVRFMDAFIEALGLEEVVLVIHDWGSALGFHWAKRNPERVKGIAFMEFIRPIPTWDEWPEFARETFQAFRTTDVGRKLIIDQNVFIEGTLPMGVVRPLTEVEMDHYREPFLNPVDREGLWRFPNELPIAGEPANIVALVEEYMDWLHQSPVPKLLFWGTPGVLIPPAEAARLAKSLPNCKAVDIGPGLNLLQEDNPDLIGSEIARWLSTLEISG

SEQ ID NO: 2257 - protein, 277 aa, Synthetic construct
MFHYVDVGPRDGTPVLFLHGNPTSSYVWRNIIPHVAPTHRCIAPDLIGMGKSDKPDLGYFFDDHVRFMDAFIEALGLEEVVLVIHDWGSALGFHWAKRNPERVKGIAFMEFIRPIPTWDEWPEFARETFQAFRTTDVGRKLIIDQNVFIEGTLPMGVVRPLTEVEMDHYREPFLNPVDRETLWRFPNELPIAGEPANIVALVEEYMDWLHQSPVPKLLFWGTPGVLIPPAEAARLAKSLPNCKAVDIGPGLNLLQEDNPDLIGSEIARWLSTLEISG

SEQ ID NO: 2258 - protein, 277 aa, Synthetic construct
MFHYVDVGPRDGTPVLFLHGNPTSSYVWRNIIPHVAPTHRCIAPDLIGMGKSDKPDLGYFFDDHVRFMDAFIEALGLEEVVLVIHDWGSALGFHWAKRNPERVKGIAFMEFIRPIPTWDEWPEFARETFQAFRTTDVGRKLIIDQNVFIEGTLPMGVVRPLTEVEMDHYREPFLNPVDREVLWRFPNELPIAGEPANIVALVEEYMDWLHQSPVPKLLFWGTPGVLIPPAEAARLAKSLPNCKAVDIGPGLNLLQEDNPDLIGSEIARWLSTLEISG

SEQ ID NO: 2259 - protein, 277 aa, Synthetic construct
MFHYVDVGPRDGTPVLFLHGNPTSSYVWRNIIPHVAPTHRCIAPDLIGMGKSDKPDLGYFFDDHVRFMDAFIEALGLEEVVLVIHDWGSALGFHWAKRNPERVKGIAFMEFIRPIPTWDEWPEFARETFQAFRTTDVGRKLIIDQNVFIEGTLPMGVVRPLTEVEMDHYREPFLNPVDRELLWRFPNELPIAGEPANIVALVEEYMDWLHQSPVPKLLFWGTPGVLIPPAEAARLAKSLPNCKAVDIGPGLNLLQEDNPDLIGSEIARWLSTLEISG

SEQ ID NO: 2260 - protein, 277 aa, Synthetic construct
MFHYVDVGPRDGTPVLFLHGNPTSSYVWRNIIPHVAPTHRCIAPDLIGMGKSDKPDLGYFFDDHVRFMDAFIEALGLEEVVLVIHDWGSALGFHWAKRNPERVKGIAFMEFIRPIPTWDEWPEFARETFQAFRTTDVGRKLIIDQNVFIEGTLPMGVVRPLTEVEMDHYREPFLNPVDREPTWRFPNELPIAGEPANIVALVEEYMDWLHQSPVPKLLFWGTPGVLIPPAEAARLAKSLPNCKAVDIGPGLNLLQEDNPDLIGSEIARWLSTLEISG

SEQ ID NO: 2261 - protein, 277 aa, Synthetic construct
MFHYVDVGPRDGTPVLFLHGNPTSSYVWRNIIPHVAPTHRCIAPDLIGMGKSDKPDLGYFFDDHVRFMDAFIEALGLEEVVLVIHDWGSALGFHWAKRNPERVKGIAFMEFIRPIPTWDEWPEFARETFQAFRTTDVGRKLIIDQNVFIEGTLPMGVVRPLTEVEMDHYREPFLNPVDREPIWRFPNELPIAGEPANIVALVEEYMDWLHQSPVPKLLFWGTPGVLIPPAEAARLAKSLPNCKAVDIGPGLNLLQEDNPDLIGSEIARWLSTLEISG

SEQ ID NO: 2262 - protein, 277 aa, Synthetic construct
MFHYVDVGPRDGTPVLFLHGNPTSSYVWRNIIPHVAPTHRCIAPDLIGMGKSDKPDLGYFFDDHVRFMDAFIEALGLEEVVLVIHDWGSALGFHWAKRNPERVKGIAFMEFIRPIPTWDEWPEFARETFQAFRTTDVGRKLIIDQNVFIEGTLPMGVVRPLTEVEMDHYREPFLNPVDREPVWRFPNELPIAGEPANIVALVEEYMDWLHQSPVPKLLFWGTPGVLIPPAEAARLAKSLPNCKAVDIGPGLNLLQEDNPDLIGSEIARWLSTLEISG

SEQ ID NO: 2263 - protein, 277 aa, Synthetic construct
MFHYVDVGPRDGTPVLFLHGNPTSSYVWRNIIPHVAPTHRCIAPDLIGMGKSDKPDLGYFFDDHVRFMDAFIEALGLEEVVLVIHDWGSALGFHWAKRNPERVKGIAFMEFIRPIPTWDEWPEFARETFQAFRTTDVGRKLIIDQNVFIEGTLPMGVVRPLTEVEMDHYREPFLNPVDREPMWRFPNELPIAGEPANIVALVEEYMDWLHQSPVPKLLFWGTPGVLIPPAEAARLAKSLPNCKAVDIGPGLNLLQEDNPDLIGSEIARWLSTLEISG

SEQ ID NO: 2264 - protein, 277 aa, Synthetic construct
MFHYVDVGPRDGTPVLFLHGNPTSSYVWRNIIPHVAPTHRCIAPDLIGMGKSDKPDLGYFFDDHVRFMDAFIEALGLEEVVLVIHDWGSALGFHWAKRNPERVKGIAFMEFIRPIPTWDEWPEFARETFQAFRTTDVGRKLIIDQNVFIEGTLPMGVVRPLTEVEMDHYREPFLNPVDREPAWRFPNELPIAGEPANIVALVEEYMDWLHQSPVPKLLFWGTPGVLIPPAEAARLAKSLPNCKAVDIGPGLNLLQEDNPDLIGSEIARWLSTLEISG

SEQ ID NO: 2265 - protein, 277 aa, Synthetic construct
MFHYVDVGPRDGTPVLFLHGNPTSSYVWRNIIPHVAPTHRCIAPDLIGMGKSDKPDLGYFFDDHVRFMDAFIEALGLEEVVLVIHDWGSALGFHWAKRNPERVKGIAFMEFIRPIPTWDEWPEFARETFQAFRTTDVGRKLIIDQNVFIEGTLPMGVVRPLTEVEMDHYREPFLNPVDREPSWRFPNELPIAGEPANIVALVEEYMDWLHQSPVPKLLFWGTPGVLIPPAEAARLAKSLPNCKAVDIGPGLNLLQEDNPDLIGSEIARWLSTLEISG

SEQ ID NO: 2266 - protein, 277 aa, Synthetic construct
MFHYVDVGPRDGTPVLFLHGNPTSSYVWRNIIPHVAPTHRCIAPDLIGMGKSDKPDLGYFFDDHVRFMDAFIEALGLEEVVLVIHDWGSALGFHWAKRNPERVKGIAFMEFIRPIPTWDEWPEFARETFQAFRTTDVGRKLIIDQNVFIEGTLPMGVVRPLTEVEMDHYREPFLNPVDREPLLRFPNELPIAGEPANIVALVEEYMDWLHQSPVPKLLFWGTPGVLIPPAEAARLAKSLPNCKAVDIGPGLNLLQEDNPDLIGSEIARWLSTLEISG

SEQ ID NO: 2267 - protein, 277 aa, Synthetic construct
MFHYVDVGPRDGTPVLFLHGNPTSSYVWRNIIPHVAPTHRCIAPDLIGMGKSDKPDLGYFFDDHVRFMDAFIEALGLEEVVLVIHDWGSALGFHWAKRNPERVKGIAFMEFIRPIPTWDEWPEFARETFQAFRTTDVGRKLIIDQNVFIEGTLPMGVVRPLTEVEMDHYREPFLNPVDREPLRRFPNELPIAGEPANIVALVEEYMDWLHQSPVPKLLFWGTPGVLIPPAEAARLAKSLPNCKAVDIGPGLNLLQEDNPDLIGSEIARWLSTLEISG

SEQ ID NO: 2268 - protein, 277 aa, Synthetic construct
MFHYVDVGPRDGTPVLFLHGNPTSSYVWRNIIPHVAPTHRCIAPDLIGMGKSDKPDLGYFFDDHVRFMDAFIEALGLEEVVLVIHDWGSALGFHWAKRNPERVKGIAFMEFIRPIPTWDEWPEFARETFQAFRTTDVGRKLIIDQNVFIEGTLPMGVVRPLTEVEMDHYREPFLNPVDREPLYRFPNELPIAGEPANIVALVEEYMDWLHQSPVPKLLFWGTPGVLIPPAEAARLAKSLPNCKAVDIGPGLNLLQEDNPDLIGSEIARWLSTLEISG

SEQ ID NO: 2269 - protein, 277 aa, Synthetic construct
MFHYVDVGPRDGTPVLFLHGNPTSSYVWRNIIPHVAPTHRCIAPDLIGMGKSDKPDLGYFFDDHVRFMDAFIEALGLEEVVLVIHDWGSALGFHWAKRNPERVKGIAFMEFIRPIPTWDEWPEFARETFQAFRTTDVGRKLIIDQNVFIEGTLPMGVVRPLTEVEMDHYREPFLNPVDREPLFRFPNELPIAGEPANIVALVEEYMDWLHQSPVPKLLFWGTPGVLIPPAEAARLAKSLPNCKAVDIGPGLNLLQEDNPDLIGSEIARWLSTLEISG

SEQ ID NO: 2270 - protein, 277 aa, Synthetic construct
MFHYVDVGPRDGTPVLFLHGNPTSSYVWRNIIPHVAPTHRCIAPDLIGMGKSDKPDLGYFFDDHVRFMDAFIEALGLEEVVLVIHDWGSALGFHWAKRNPERVKGIAFMEFIRPIPTWDEWPEFARETFQAFRTTDVGRKLIIDQNVFIEGTLPMGVVRPLTEVEMDHYREPFLNPVDREPLMRFPNELPIAGEPANIVALVEEYMDWLHQSPVPKLLFWGTPGVLIPPAEAARLAKSLPNCKAVDIGPGLNLLQEDNPDLIGSEIARWLSTLEISG

SEQ ID NO: 2271 - protein, 277 aa, Synthetic construct
MFHYVDVGPRDGTPVLFLHGNPTSSYVWRNIIPHVAPTHRCIAPDLIGMGKSDKPDLGYFFDDHVRFMDAFIEALGLEEVVLVIHDWGSALGFHWAKRNPERVKGIAFMEFIRPIPTWDEWPEFARETFQAFRTTDVGRKLIIDQNVFIEGTLPMGVVRPLTEVEMDHYREPFLNPVDREPLIRFPNELPIAGEPANIVALVEEYMDWLHQSPVPKLLFWGTPGVLIPPAEAARLAKSLPNCKAVDIGPGLNLLQEDNPDLIGSEIARWLSTLEISG

SEQ ID NO: 2272 - protein, 277 aa, Synthetic construct
MFHYVDVGPRDGTPVLFLHGNPTSSYVWRNIIPHVAPTHRCIAPDLIGMGKSDKPDLGYFFDDHVRFMDAFIEALGLEEVVLVIHDWGSALGFHWAKRNPERVKGIAFMEFIRPIPTWDEWPEFARETFQAFRTTDVGRKLIIDQNVFIEGTLPMGVVRPLTEVEMDHYREPFLNPVDREPLWQFPNELPIAGEPANIVALVEEYMDWLHQSPVPKLLFWGTPGVLIPPAEAARLAKSLPNCKAVDIGPGLNLLQEDNPDLIGSEIARWLSTLEISG

SEQ ID NO: 2273 - protein, 277 aa, Synthetic construct
MFHYVDVGPRDGTPVLFLHGNPTSSYVWRNIIPHVAPTHRCIAPDLIGMGKSDKPDLGYFFDDHVRFMDAFIEALGLEEVVLVIHDWGSALGFHWAKRNPERVKGIAFMEFIRPIPTWDEWPEFARETFQAFRTTDVGRKLIIDQNVFIEGTLPMGVVRPLTEVEMDHYREPFLNPVDREPLWKFPNELPIAGEPANIVALVEEYMDWLHQSPVPKLLFWGTPGVLIPPAEAARLAKSLPNCKAVDIGPGLNLLQEDNPDLIGSEIARWLSTLEISG

SEQ ID NO: 2274 - protein, 277 aa, Synthetic construct
MFHYVDVGPRDGTPVLFLHGNPTSSYVWRNIIPHVAPTHRCIAPDLIGMGKSDKPDLGYFFDDHVRFMDAFIEALGLEEVVLVIHDWGSALGFHWAKRNPERVKGIAFMEFIRPIPTWDEWPEFARETFQAFRTTDVGRKLIIDQNVFIEGTLPMGVVRPLTEVEMDHYREPFLNPVDREPLWAFPNELPIAGEPANIVALVEEYMDWLHQSPVPKLLFWGTPGVLIPPAEAARLAKSLPNCKAVDIGPGLNLLQEDNPDLIGSEIARWLSTLEISG

SEQ ID NO: 2275 - protein, 277 aa, Synthetic construct
MFHYVDVGPRDGTPVLFLHGNPTSSYVWRNIIPHVAPTHRCIAPDLIGMGKSDKPDLGYFFDDHVRFMDAFIEALGLEEVVLVIHDWGSALGFHWAKRNPERVKGIAFMEFIRPIPTWDEWPEFARETFQAFRTTDVGRKLIIDQNVFIEGTLPMGVVRPLTEVEMDHYREPFLNPVDREPLWTFPNELPIAGEPANIVALVEEYMDWLHQSPVPKLLFWGTPGVLIPPAEAARLAKSLPNCKAVDIGPGLNLLQEDNPDLIGSEIARWLSTLEISG

SEQ ID NO: 2276 - protein, 277 aa, Synthetic construct
MFHYVDVGPRDGTPVLFLHGNPTSSYVWRNIIPHVAPTHRCIAPDLIGMGKSDKPDLGYFFDDHVRFMDAFIEALGLEEVVLVIHDWGSALGFHWAKRNPERVKGIAFMEFIRPIPTWDEWPEFARETFQAFRTTDVGRKLIIDQNVFIEGTLPMGVVRPLTEVEMDHYREPFLNPVDREPLWSFPNELPIAGEPANIVALVEEYMDWLHQSPVPKLLFWGTPGVLIPPAEAARLAKSLPNCKAVDIGPGLNLLQEDNPDLIGSEIARWLSTLEISG

SEQ ID NO: 2277 - protein, 277 aa, Synthetic construct
MFHYVDVGPRDGTPVLFLHGNPTSSYVWRNIIPHVAPTHRCIAPDLIGMGKSDKPDLGYFFDDHVRFMDAFIEALGLEEVVLVIHDWGSALGFHWAKRNPERVKGIAFMEFIRPIPTWDEWPEFARETFQAFRTTDVGRKLIIDQNVFIEGTLPMGVVRPLTEVEMDHYREPFLNPVDREPLWLFPNELPIAGEPANIVALVEEYMDWLHQSPVPKLLFWGTPGVLIPPAEAARLAKSLPNCKAVDIGPGLNLLQEDNPDLIGSEIARWLSTLEISG

SEQ ID NO: 2278 - protein, 277 aa, Synthetic construct
MFHYVDVGPRDGTPVLFLHGNPTSSYVWRNIIPHVAPTHRCIAPDLIGMGKSDKPDLGYFFDDHVRFMDAFIEALGLEEVVLVIHDWGSALGFHWAKRNPERVKGIAFMEFIRPIPTWDEWPEFARETFQAFRTTDVGRKLIIDQNVFIEGTLPMGVVRPLTEVEMDHYREPFLNPVDREPLWRWPNELPIAGEPANIVALVEEYMDWLHQSPVPKLLFWGTPGVLIPPAEAARLAKSLPNCKAVDIGPGLNLLQEDNPDLIGSEIARWLSTLEISG

SEQ ID NO: 2279 - protein, 277 aa, Synthetic construct
MFHYVDVGPRDGTPVLFLHGNPTSSYVWRNIIPHVAPTHRCIAPDLIGMGKSDKPDLGYFFDDHVRFMDAFIEALGLEEVVLVIHDWGSALGFHWAKRNPERVKGIAFMEFIRPIPTWDEWPEFARETFQAFRTTDVGRKLIIDQNVFIEGTLPMGVVRPLTEVEMDHYREPFLNPVDREPLWRLPNELPIAGEPANIVALVEEYMDWLHQSPVPKLLFWGTPGVLIPPAEAARLAKSLPNCKAVDIGPGLNLLQEDNPDLIGSEIARWLSTLEISG

SEQ ID NO: 2280 - protein, 277 aa, Synthetic construct
MFHYVDVGPRDGTPVLFLHGNPTSSYVWRNIIPHVAPTHRCIAPDLIGMGKSDKPDLGYFFDDHVRFMDAFIEALGLEEVVLVIHDWGSALGFHWAKRNPERVKGIAFMEFIRPIPTWDEWPEFARETFQAFRTTDVGRKLIIDQNVFIEGTLPMGVVRPLTEVEMDHYREPFLNPVDREPLWRYPNELPIAGEPANIVALVEEYMDWLHQSPVPKLLFWGTPGVLIPPAEAARLAKSLPNCKAVDIGPGLNLLQEDNPDLIGSEIARWLSTLEISG

SEQ ID NO: 2281 - protein, 277 aa, Synthetic construct
MFHYVDVGPRDGTPVLFLHGNPTSSYVWRNIIPHVAPTHRCIAPDLIGMGKSDKPDLGYFFDDHVRFMDAFIEALGLEEVVLVIHDWGSALGFHWAKRNPERVKGIAFMEFIRPIPTWDEWPEFARETFQAFRTTDVGRKLIIDQNVFIEGTLPMGVVRPLTEVEMDHYREPFLNPVDREPLWRMPNELPIAGEPANIVALVEEYMDWLHQSPVPKLLFWGTPGVLIPPAEAARLAKSLPNCKAVDIGPGLNLLQEDNPDLIGSEIARWLSTLEISG

SEQ ID NO: 2282 - protein, 277 aa, Synthetic construct
MFHYVDVGPRDGTPVLFLHGNPTSSYVWRNIIPHVAPTHRCIAPDLIGMGKSDKPDLGYFFDDHVRFMDAFIEALGLEEVVLVIHDWGSALGFHWAKRNPERVKGIAFMEFIRPIPTWDEWPEFARETFQAFRTTDVGRKLIIDQNVFIEGTLPMGVVRPLTEVEMDHYREPFLNPVDREPLWRIPNELPIAGEPANIVALVEEYMDWLHQSPVPKLLFWGTPGVLIPPAEAARLAKSLPNCKAVDIGPGLNLLQEDNPDLIGSEIARWLSTLEISG

SEQ ID NO: 2283 - protein, 277 aa, Synthetic construct
MFHYVDVGPRDGTPVLFLHGNPTSSYVWRNIIPHVAPTHRCIAPDLIGMGKSDKPDLGYFFDDHVRFMDAFIEALGLEEVVLVIHDWGSALGFHWAKRNPERVKGIAFMEFIRPIPTWDEWPEFARETFQAFRTTDVGRKLIIDQNVFIEGTLPMGVVRPLTEVEMDHYREPFLNPVDREPLWRVPNELPIAGEPANIVALVEEYMDWLHQSPVPKLLFWGTPGVLIPPAEAARLAKSLPNCKAVDIGPGLNLLQEDNPDLIGSEIARWLSTLEISG

SEQ ID NO: 2284 - protein, 277 aa, Synthetic construct
MFHYVDVGPRDGTPVLFLHGNPTSSYVWRNIIPHVAPTHRCIAPDLIGMGKSDKPDLGYFFDDHVRFMDAFIEALGLEEVVLVIHDWGSALGFHWAKRNPERVKGIAFMEFIRPIPTWDEWPEFARETFQAFRTTDVGRKLIIDQNVFIEGTLPMGVVRPLTEVEMDHYREPFLNPVDREPLWRFANELPIAGEPANIVALVEEYMDWLHQSPVPKLLFWGTPGVLIPPAEAARLAKSLPNCKAVDIGPGLNLLQEDNPDLIGSEIARWLSTLEISG

SEQ ID NO: 2285 - protein, 277 aa, Synthetic construct
MFHYVDVGPRDGTPVLFLHGNPTSSYVWRNIIPHVAPTHRCIAPDLIGMGKSDKPDLGYFFDDHVRFMDAFIEALGLEEVVLVIHDWGSALGFHWAKRNPERVKGIAFMEFIRPIPTWDEWPEFARETFQAFRTTDVGRKLIIDQNVFIEGTLPMGVVRPLTEVEMDHYREPFLNPVDREPLWRFVNELPIAGEPANIVALVEEYMDWLHQSPVPKLLFWGTPGVLIPPAEAARLAKSLPNCKAVDIGPGLNLLQEDNPDLIGSEIARWLSTLEISG

SEQ ID NO: 2286 - protein, 277 aa, Synthetic construct
MFHYVDVGPRDGTPVLFLHGNPTSSYVWRNIIPHVAPTHRCIAPDLIGMGKSDKPDLGYFFDDHVRFMDAFIEALGLEEVVLVIHDWGSALGFHWAKRNPERVKGIAFMEFIRPIPTWDEWPEFARETFQAFRTTDVGRKLIIDQNVFIEGTLPMGVVRPLTEVEMDHYREPFLNPVDREPLWRFSNELPIAGEPANIVALVEEYMDWLHQSPVPKLLFWGTPGVLIPPAEAARLAKSLPNCKAVDIGPGLNLLQEDNPDLIGSEIARWLSTLEISG

SEQ ID NO: 2287 - protein, 277 aa, Synthetic construct
MFHYVDVGPRDGTPVLFLHGNPTSSYVWRNIIPHVAPTHRCIAPDLIGMGKSDKPDLGYFFDDHVRFMDAFIEALGLEEVVLVIHDWGSALGFHWAKRNPERVKGIAFMEFIRPIPTWDEWPEFARETFQAFRTTDVGRKLIIDQNVFIEGTLPMGVVRPLTEVEMDHYREPFLNPVDREPLWRFTNELPIAGEPANIVALVEEYMDWLHQSPVPKLLFWGTPGVLIPPAEAARLAKSLPNCKAVDIGPGLNLLQEDNPDLIGSEIARWLSTLEISG

SEQ ID NO: 2288 - protein, 277 aa, Synthetic construct
MFHYVDVGPRDGTPVLFLHGNPTSSYVWRNIIPHVAPTHRCIAPDLIGMGKSDKPDLGYFFDDHVRFMDAFIEALGLEEVVLVIHDWGSALGFHWAKRNPERVKGIAFMEFIRPIPTWDEWPEFARETFQAFRTTDVGRKLIIDQNVFIEGTLPMGVVRPLTEVEMDHYREPFLNPVDREPLWRFLNELPIAGEPANIVALVEEYMDWLHQSPVPKLLFWGTPGVLIPPAEAARLAKSLPNCKAVDIGPGLNLLQEDNPDLIGSEIARWLSTLEISG

SEQ ID NO: 2289 - protein, 277 aa, Synthetic construct
MFHYVDVGPRDGTPVLFLHGNPTSSYVWRNIIPHVAPTHRCIAPDLIGMGKSDKPDLGYFFDDHVRFMDAFIEALGLEEVVLVIHDWGSALGFHWAKRNPERVKGIAFMEFIRPIPTWDEWPEFARETFQAFRTTDVGRKLIIDQNVFIEGTLPMGVVRPLTEVEMDHYREPFLNPVDREPLWRFQNELPIAGEPANIVALVEEYMDWLHQSPVPKLLFWGTPGVLIPPAEAARLAKSLPNCKAVDIGPGLNLLQEDNPDLIGSEIARWLSTLEISG

SEQ ID NO: 2290 - protein, 277 aa, Synthetic construct
MFHYVDVGPRDGTPVLFLHGNPTSSYVWRNIIPHVAPTHRCIAPDLIGMGKSDKPDLGYFFDDHVRFMDAFIEALGLEEVVLVIHDWGSALGFHWAKRNPERVKGIAFMEFIRPIPTWDEWPEFARETFQAFRTTDVGRKLIIDQNVFIEGTLPMGVVRPLTEVEMDHYREPFLNPVDREPLWRFPSELPIAGEPANIVALVEEYMDWLHQSPVPKLLFWGTPGVLIPPAEAARLAKSLPNCKAVDIGPGLNLLQEDNPDLIGSEIARWLSTLEISG

SEQ ID NO: 2291 - protein, 277 aa, Synthetic construct
MFHYVDVGPRDGTPVLFLHGNPTSSYVWRNIIPHVAPTHRCIAPDLIGMGKSDKPDLGYFFDDHVRFMDAFIEALGLEEVVLVIHDWGSALGFHWAKRNPERVKGIAFMEFIRPIPTWDEWPEFARETFQAFRTTDVGRKLIIDQNVFIEGTLPMGVVRPLTEVEMDHYREPFLNPVDREPLWRFPRELPIAGEPANIVALVEEYMDWLHQSPVPKLLFWGTPGVLIPPAEAARLAKSLPNCKAVDIGPGLNLLQEDNPDLIGSEIARWLSTLEISG

SEQ ID NO: 2292 - protein, 277 aa, Synthetic construct
MFHYVDVGPRDGTPVLFLHGNPTSSYVWRNIIPHVAPTHRCIAPDLIGMGKSDKPDLGYFFDDHVRFMDAFIEALGLEEVVLVIHDWGSALGFHWAKRNPERVKGIAFMEFIRPIPTWDEWPEFARETFQAFRTTDVGRKLIIDQNVFIEGTLPMGVVRPLTEVEMDHYREPFLNPVDREPLWRFPQELPIAGEPANIVALVEEYMDWLHQSPVPKLLFWGTPGVLIPPAEAARLAKSLPNCKAVDIGPGLNLLQEDNPDLIGSEIARWLSTLEISG

SEQ ID NO: 2293 - protein, 277 aa, Synthetic construct
MFHYVDVGPRDGTPVLFLHGNPTSSYVWRNIIPHVAPTHRCIAPDLIGMGKSDKPDLGYFFDDHVRFMDAFIEALGLEEVVLVIHDWGSALGFHWAKRNPERVKGIAFMEFIRPIPTWDEWPEFARETFQAFRTTDVGRKLIIDQNVFIEGTLPMGVVRPLTEVEMDHYREPFLNPVDREPLWRFPAELPIAGEPANIVALVEEYMDWLHQSPVPKLLFWGTPGVLIPPAEAARLAKSLPNCKAVDIGPGLNLLQEDNPDLIGSEIARWLSTLEISG

SEQ ID NO: 2294 - protein, 277 aa, Synthetic construct
MFHYVDVGPRDGTPVLFLHGNPTSSYVWRNIIPHVAPTHRCIAPDLIGMGKSDKPDLGYFFDDHVRFMDAFIEALGLEEVVLVIHDWGSALGFHWAKRNPERVKGIAFMEFIRPIPTWDEWPEFARETFQAFRTTDVGRKLIIDQNVFIEGTLPMGVVRPLTEVEMDHYREPFLNPVDREPLWRFPTELPIAGEPANIVALVEEYMDWLHQSPVPKLLFWGTPGVLIPPAEAARLAKSLPNCKAVDIGPGLNLLQEDNPDLIGSEIARWLSTLEISG

SEQ ID NO: 2295 - protein, 277 aa, Synthetic construct
MFHYVDVGPRDGTPVLFLHGNPTSSYVWRNIIPHVAPTHRCIAPDLIGMGKSDKPDLGYFFDDHVRFMDAFIEALGLEEVVLVIHDWGSALGFHWAKRNPERVKGIAFMEFIRPIPTWDEWPEFARETFQAFRTTDVGRKLIIDQNVFIEGTLPMGVVRPLTEVEMDHYREPFLNPVDREPLWRFPLELPIAGEPANIVALVEEYMDWLHQSPVPKLLFWGTPGVLIPPAEAARLAKSLPNCKAVDIGPGLNLLQEDNPDLIGSEIARWLSTLEISG

SEQ ID NO: 2296 - protein, 277 aa, Synthetic construct
MFHYVDVGPRDGTPVLFLHGNPTSSYVWRNIIPHVAPTHRCIAPDLIGMGKSDKPDLGYFFDDHVRFMDAFIEALGLEEVVLVIHDWGSALGFHWAKRNPERVKGIAFMEFIRPIPTWDEWPEFARETFQAFRTTDVGRKLIIDQNVFIEGTLPMGVVRPLTEVEMDHYREPFLNPVDREPLWRFPNQLPIAGEPANIVALVEEYMDWLHQSPVPKLLFWGTPGVLIPPAEAARLAKSLPNCKAVDIGPGLNLLQEDNPDLIGSEIARWLSTLEISG

SEQ ID NO: 2297 - protein, 277 aa, Synthetic construct
MFHYVDVGPRDGTPVLFLHGNPTSSYVWRNIIPHVAPTHRCIAPDLIGMGKSDKPDLGYFFDDHVRFMDAFIEALGLEEVVLVIHDWGSALGFHWAKRNPERVKGIAFMEFIRPIPTWDEWPEFARETFQAFRTTDVGRKLIIDQNVFIEGTLPMGVVRPLTEVEMDHYREPFLNPVDREPLWRFPNDLPIAGEPANIVALVEEYMDWLHQSPVPKLLFWGTPGVLIPPAEAARLAKSLPNCKAVDIGPGLNLLQEDNPDLIGSEIARWLSTLEISG

SEQ ID NO: 2298 - protein, 277 aa, Synthetic construct
MFHYVDVGPRDGTPVLFLHGNPTSSYVWRNIIPHVAPTHRCIAPDLIGMGKSDKPDLGYFFDDHVRFMDAFIEALGLEEVVLVIHDWGSALGFHWAKRNPERVKGIAFMEFIRPIPTWDEWPEFARETFQAFRTTDVGRKLIIDQNVFIEGTLPMGVVRPLTEVEMDHYREPFLNPVDREPLWRFPNALPIAGEPANIVALVEEYMDWLHQSPVPKLLFWGTPGVLIPPAEAARLAKSLPNCKAVDIGPGLNLLQEDNPDLIGSEIARWLSTLEISG

SEQ ID NO: 2299 - protein, 277 aa, Synthetic construct
MFHYVDVGPRDGTPVLFLHGNPTSSYVWRNIIPHVAPTHRCIAPDLIGMGKSDKPDLGYFFDDHVRFMDAFIEALGLEEVVLVIHDWGSALGFHWAKRNPERVKGIAFMEFIRPIPTWDEWPEFARETFQAFRTTDVGRKLIIDQNVFIEGTLPMGVVRPLTEVEMDHYREPFLNPVDREPLWRFPNSLPIAGEPANIVALVEEYMDWLHQSPVPKLLFWGTPGVLIPPAEAARLAKSLPNCKAVDIGPGLNLLQEDNPDLIGSEIARWLSTLEISG

SEQ ID NO: 2300 - protein, 277 aa, Synthetic construct
MFHYVDVGPRDGTPVLFLHGNPTSSYVWRNIIPHVAPTHRCIAPDLIGMGKSDKPDLGYFFDDHVRFMDAFIEALGLEEVVLVIHDWGSALGFHWAKRNPERVKGIAFMEFIRPIPTWDEWPEFARETFQAFRTTDVGRKLIIDQNVFIEGTLPMGVVRPLTEVEMDHYREPFLNPVDREPLWRFPNMLPIAGEPANIVALVEEYMDWLHQSPVPKLLFWGTPGVLIPPAEAARLAKSLPNCKAVDIGPGLNLLQEDNPDLIGSEIARWLSTLEISG

SEQ ID NO: 2301 - protein, 277 aa, Synthetic construct
MFHYVDVGPRDGTPVLFLHGNPTSSYVWRNIIPHVAPTHRCIAPDLIGMGKSDKPDLGYFFDDHVRFMDAFIEALGLEEVVLVIHDWGSALGFHWAKRNPERVKGIAFMEFIRPIPTWDEWPEFARETFQAFRTTDVGRKLIIDQNVFIEGTLPMGVVRPLTEVEMDHYREPFLNPVDREPLWRFPNLLPIAGEPANIVALVEEYMDWLHQSPVPKLLFWGTPGVLIPPAEAARLAKSLPNCKAVDIGPGLNLLQEDNPDLIGSEIARWLSTLEISG

SEQ ID NO: 2302 - protein, 277 aa, Synthetic construct
MFHYVDVGPRDGTPVLFLHGNPTSSYVWRNIIPHVAPTHRCIAPDLIGMGKSDKPDLGYFFDDHVRFMDAFIEALGLEEVVLVIHDWGSALGFHWAKRNPERVKGIAFMEFIRPIPTWDEWPEFARETFQAFRTTDVGRKLIIDQNVFIEGTLPMGVVRPLTEVEMDHYREPFLNPVDREPLWRFPNEIPIAGEPANIVALVEEYMDWLHQSPVPKLLFWGTPGVLIPPAEAARLAKSLPNCKAVDIGPGLNLLQEDNPDLIGSEIARWLSTLEISG

SEQ ID NO: 2303 - protein, 277 aa, Synthetic construct
MFHYVDVGPRDGTPVLFLHGNPTSSYVWRNIIPHVAPTHRCIAPDLIGMGKSDKPDLGYFFDDHVRFMDAFIEALGLEEVVLVIHDWGSALGFHWAKRNPERVKGIAFMEFIRPIPTWDEWPEFARETFQAFRTTDVGRKLIIDQNVFIEGTLPMGVVRPLTEVEMDHYREPFLNPVDREPLWRFPNEVPIAGEPANIVALVEEYMDWLHQSPVPKLLFWGTPGVLIPPAEAARLAKSLPNCKAVDIGPGLNLLQEDNPDLIGSEIARWLSTLEISG

SEQ ID NO: 2304 - protein, 277 aa, Synthetic construct
MFHYVDVGPRDGTPVLFLHGNPTSSYVWRNIIPHVAPTHRCIAPDLIGMGKSDKPDLGYFFDDHVRFMDAFIEALGLEEVVLVIHDWGSALGFHWAKRNPERVKGIAFMEFIRPIPTWDEWPEFARETFQAFRTTDVGRKLIIDQNVFIEGTLPMGVVRPLTEVEMDHYREPFLNPVDREPLWRFPNEMPIAGEPANIVALVEEYMDWLHQSPVPKLLFWGTPGVLIPPAEAARLAKSLPNCKAVDIGPGLNLLQEDNPDLIGSEIARWLSTLEISG

SEQ ID NO: 2305 - protein, 277 aa, Synthetic construct
MFHYVDVGPRDGTPVLFLHGNPTSSYVWRNIIPHVAPTHRCIAPDLIGMGKSDKPDLGYFFDDHVRFMDAFIEALGLEEVVLVIHDWGSALGFHWAKRNPERVKGIAFMEFIRPIPTWDEWPEFARETFQAFRTTDVGRKLIIDQNVFIEGTLPMGVVRPLTEVEMDHYREPFLNPVDREPLWRFPNEFPIAGEPANIVALVEEYMDWLHQSPVPKLLFWGTPGVLIPPAEAARLAKSLPNCKAVDIGPGLNLLQEDNPDLIGSEIARWLSTLEISG

SEQ ID NO: 2306 - protein, 277 aa, Synthetic construct
MFHYVDVGPRDGTPVLFLHGNPTSSYVWRNIIPHVAPTHRCIAPDLIGMGKSDKPDLGYFFDDHVRFMDAFIEALGLEEVVLVIHDWGSALGFHWAKRNPERVKGIAFMEFIRPIPTWDEWPEFARETFQAFRTTDVGRKLIIDQNVFIEGTLPMGVVRPLTEVEMDHYREPFLNPVDREPLWRFPNETPIAGEPANIVALVEEYMDWLHQSPVPKLLFWGTPGVLIPPAEAARLAKSLPNCKAVDIGPGLNLLQEDNPDLIGSEIARWLSTLEISG

SEQ ID NO: 2307 - protein, 277 aa, Synthetic construct
MFHYVDVGPRDGTPVLFLHGNPTSSYVWRNIIPHVAPTHRCIAPDLIGMGKSDKPDLGYFFDDHVRFMDAFIEALGLEEVVLVIHDWGSALGFHWAKRNPERVKGIAFMEFIRPIPTWDEWPEFARETFQAFRTTDVGRKLIIDQNVFIEGTLPMGVVRPLTEVEMDHYREPFLNPVDREPLWRFPNEAPIAGEPANIVALVEEYMDWLHQSPVPKLLFWGTPGVLIPPAEAARLAKSLPNCKAVDIGPGLNLLQEDNPDLIGSEIARWLSTLEISG

SEQ ID NO: 2308 - protein, 277 aa, Synthetic construct
MFHYVDVGPRDGTPVLFLHGNPTSSYVWRNIIPHVAPTHRCIAPDLIGMGKSDKPDLGYFFDDHVRFMDAFIEALGLEEVVLVIHDWGSALGFHWAKRNPERVKGIAFMEFIRPIPTWDEWPEFARETFQAFRTTDVGRKLIIDQNVFIEGTLPMGVVRPLTEVEMDHYREPFLNPVDREPLWRFPNELAIAGEPANIVALVEEYMDWLHQSPVPKLLFWGTPGVLIPPAEAARLAKSLPNCKAVDIGPGLNLLQEDNPDLIGSEIARWLSTLEISG

SEQ ID NO: 2309 - protein, 277 aa, Synthetic construct
MFHYVDVGPRDGTPVLFLHGNPTSSYVWRNIIPHVAPTHRCIAPDLIGMGKSDKPDLGYFFDDHVRFMDAFIEALGLEEVVLVIHDWGSALGFHWAKRNPERVKGIAFMEFIRPIPTWDEWPEFARETFQAFRTTDVGRKLIIDQNVFIEGTLPMGVVRPLTEVEMDHYREPFLNPVDREPLWRFPNELSIAGEPANIVALVEEYMDWLHQSPVPKLLFWGTPGVLIPPAEAARLAKSLPNCKAVDIGPGLNLLQEDNPDLIGSEIARWLSTLEISG

SEQ ID NO: 2310 - protein, 277 aa, Synthetic construct
MFHYVDVGPRDGTPVLFLHGNPTSSYVWRNIIPHVAPTHRCIAPDLIGMGKSDKPDLGYFFDDHVRFMDAFIEALGLEEVVLVIHDWGSALGFHWAKRNPERVKGIAFMEFIRPIPTWDEWPEFARETFQAFRTTDVGRKLIIDQNVFIEGTLPMGVVRPLTEVEMDHYREPFLNPVDREPLWRFPNELEIAGEPANIVALVEEYMDWLHQSPVPKLLFWGTPGVLIPPAEAARLAKSLPNCKAVDIGPGLNLLQEDNPDLIGSEIARWLSTLEISG

SEQ ID NO: 2311 - protein, 277 aa, Synthetic construct
MFHYVDVGPRDGTPVLFLHGNPTSSYVWRNIIPHVAPTHRCIAPDLIGMGKSDKPDLGYFFDDHVRFMDAFIEALGLEEVVLVIHDWGSALGFHWAKRNPERVKGIAFMEFIRPIPTWDEWPEFARETFQAFRTTDVGRKLIIDQNVFIEGTLPMGVVRPLTEVEMDHYREPFLNPVDREPLWRFPNELTIAGEPANIVALVEEYMDWLHQSPVPKLLFWGTPGVLIPPAEAARLAKSLPNCKAVDIGPGLNLLQEDNPDLIGSEIARWLSTLEISG

SEQ ID NO: 2312 - protein, 277 aa, Synthetic construct
MFHYVDVGPRDGTPVLFLHGNPTSSYVWRNIIPHVAPTHRCIAPDLIGMGKSDKPDLGYFFDDHVRFMDAFIEALGLEEVVLVIHDWGSALGFHWAKRNPERVKGIAFMEFIRPIPTWDEWPEFARETFQAFRTTDVGRKLIIDQNVFIEGTLPMGVVRPLTEVEMDHYREPFLNPVDREPLWRFPNELLIAGEPANIVALVEEYMDWLHQSPVPKLLFWGTPGVLIPPAEAARLAKSLPNCKAVDIGPGLNLLQEDNPDLIGSEIARWLSTLEISG

SEQ ID NO: 2313 - protein, 277 aa, Synthetic construct
MFHYVDVGPRDGTPVLFLHGNPTSSYVWRNIIPHVAPTHRCIAPDLIGMGKSDKPDLGYFFDDHVRFMDAFIEALGLEEVVLVIHDWGSALGFHWAKRNPERVKGIAFMEFIRPIPTWDEWPEFARETFQAFRTTDVGRKLIIDQNVFIEGTLPMGVVRPLTEVEMDHYREPFLNPVDREPLWRFPNELQIAGEPANIVALVEEYMDWLHQSPVPKLLFWGTPGVLIPPAEAARLAKSLPNCKAVDIGPGLNLLQEDNPDLIGSEIARWLSTLEISG

SEQ ID NO: 2314 - protein, 277 aa, Synthetic construct
MFHYVDVGPRDGTPVLFLHGNPTSSYVWRNIIPHVAPTHRCIAPDLIGMGKSDKPDLGYFFDDHVRFMDAFIEALGLEEVVLVIHDWGSALGFHWAKRNPERVKGIAFMEFIRPIPTWDEWPEFARETFQAFRTTDVGRKLIIDQNVFIEGTLPMGVVRPLTEVEMDHYREPFLNPVDREPLWRFPNELPLAGEPANIVALVEEYMDWLHQSPVPKLLFWGTPGVLIPPAEAARLAKSLPNCKAVDIGPGLNLLQEDNPDLIGSEIARWLSTLEISG

SEQ ID NO: 2315 - protein, 277 aa, Synthetic construct
MFHYVDVGPRDGTPVLFLHGNPTSSYVWRNIIPHVAPTHRCIAPDLIGMGKSDKPDLGYFFDDHVRFMDAFIEALGLEEVVLVIHDWGSALGFHWAKRNPERVKGIAFMEFIRPIPTWDEWPEFARETFQAFRTTDVGRKLIIDQNVFIEGTLPMGVVRPLTEVEMDHYREPFLNPVDREPLWRFPNELPVAGEPANIVALVEEYMDWLHQSPVPKLLFWGTPGVLIPPAEAARLAKSLPNCKAVDIGPGLNLLQEDNPDLIGSEIARWLSTLEISG

SEQ ID NO: 2316 - protein, 277 aa, Synthetic construct
MFHYVDVGPRDGTPVLFLHGNPTSSYVWRNIIPHVAPTHRCIAPDLIGMGKSDKPDLGYFFDDHVRFMDAFIEALGLEEVVLVIHDWGSALGFHWAKRNPERVKGIAFMEFIRPIPTWDEWPEFARETFQAFRTTDVGRKLIIDQNVFIEGTLPMGVVRPLTEVEMDHYREPFLNPVDREPLWRFPNELPMAGEPANIVALVEEYMDWLHQSPVPKLLFWGTPGVLIPPAEAARLAKSLPNCKAVDIGPGLNLLQEDNPDLIGSEIARWLSTLEISG

SEQ ID NO: 2317 - protein, 277 aa, Synthetic construct
MFHYVDVGPRDGTPVLFLHGNPTSSYVWRNIIPHVAPTHRCIAPDLIGMGKSDKPDLGYFFDDHVRFMDAFIEALGLEEVVLVIHDWGSALGFHWAKRNPERVKGIAFMEFIRPIPTWDEWPEFARETFQAFRTTDVGRKLIIDQNVFIEGTLPMGVVRPLTEVEMDHYREPFLNPVDREPLWRFPNELPTAGEPANIVALVEEYMDWLHQSPVPKLLFWGTPGVLIPPAEAARLAKSLPNCKAVDIGPGLNLLQEDNPDLIGSEIARWLSTLEISG

SEQ ID NO: 2318 - protein, 277 aa, Synthetic construct
MFHYVDVGPRDGTPVLFLHGNPTSSYVWRNIIPHVAPTHRCIAPDLIGMGKSDKPDLGYFFDDHVRFMDAFIEALGLEEVVLVIHDWGSALGFHWAKRNPERVKGIAFMEFIRPIPTWDEWPEFARETFQAFRTTDVGRKLIIDQNVFIEGTLPMGVVRPLTEVEMDHYREPFLNPVDREPLWRFPNELPFAGEPANIVALVEEYMDWLHQSPVPKLLFWGTPGVLIPPAEAARLAKSLPNCKAVDIGPGLNLLQEDNPDLIGSEIARWLSTLEISG

SEQ ID NO: 2319 - protein, 277 aa, Synthetic construct
MFHYVDVGPRDGTPVLFLHGNPTSSYVWRNIIPHVAPTHRCIAPDLIGMGKSDKPDLGYFFDDHVRFMDAFIEALGLEEVVLVIHDWGSALGFHWAKRNPERVKGIAFMEFIRPIPTWDEWPEFARETFQAFRTTDVGRKLIIDQNVFIEGTLPMGVVRPLTEVEMDHYREPFLNPVDREPLWRFPNELPAAGEPANIVALVEEYMDWLHQSPVPKLLFWGTPGVLIPPAEAARLAKSLPNCKAVDIGPGLNLLQEDNPDLIGSEIARWLSTLEISG

SEQ ID NO: 2320 - protein, 277 aa, Synthetic construct
MFHYVDVGPRDGTPVLFLHGNPTSSYVWRNIIPHVAPTHRCIAPDLIGMGKSDKPDLGYFFDDHVRFMDAFIEALGLEEVVLVIHDWGSALGFHWAKRNPERVKGIAFMEFIRPIPTWDEWPEFARETFQAFRTTDVGRKLIIDQNVFIEGTLPMGVVRPLTEVEMDHYREPFLNPVDREPLWRFPNELPIEGEPANIVALVEEYMDWLHQSPVPKLLFWGTPGVLIPPAEAARLAKSLPNCKAVDIGPGLNLLQEDNPDLIGSEIARWLSTLEISG

SEQ ID NO: 2321 - protein, 277 aa, Synthetic construct
MFHYVDVGPRDGTPVLFLHGNPTSSYVWRNIIPHVAPTHRCIAPDLIGMGKSDKPDLGYFFDDHVRFMDAFIEALGLEEVVLVIHDWGSALGFHWAKRNPERVKGIAFMEFIRPIPTWDEWPEFARETFQAFRTTDVGRKLIIDQNVFIEGTLPMGVVRPLTEVEMDHYREPFLNPVDREPLWRFPNELPIDGEPANIVALVEEYMDWLHQSPVPKLLFWGTPGVLIPPAEAARLAKSLPNCKAVDIGPGLNLLQEDNPDLIGSEIARWLSTLEISG

SEQ ID NO: 2322 - protein, 277 aa, Synthetic construct
MFHYVDVGPRDGTPVLFLHGNPTSSYVWRNIIPHVAPTHRCIAPDLIGMGKSDKPDLGYFFDDHVRFMDAFIEALGLEEVVLVIHDWGSALGFHWAKRNPERVKGIAFMEFIRPIPTWDEWPEFARETFQAFRTTDVGRKLIIDQNVFIEGTLPMGVVRPLTEVEMDHYREPFLNPVDREPLWRFPNELPIGGEPANIVALVEEYMDWLHQSPVPKLLFWGTPGVLIPPAEAARLAKSLPNCKAVDIGPGLNLLQEDNPDLIGSEIARWLSTLEISG

SEQ ID NO: 2323 - protein, 277 aa, Synthetic construct
MFHYVDVGPRDGTPVLFLHGNPTSSYVWRNIIPHVAPTHRCIAPDLIGMGKSDKPDLGYFFDDHVRFMDAFIEALGLEEVVLVIHDWGSALGFHWAKRNPERVKGIAFMEFIRPIPTWDEWPEFARETFQAFRTTDVGRKLIIDQNVFIEGTLPMGVVRPLTEVEMDHYREPFLNPVDREPLWRFPNELPISGEPANIVALVEEYMDWLHQSPVPKLLFWGTPGVLIPPAEAARLAKSLPNCKAVDIGPGLNLLQEDNPDLIGSEIARWLSTLEISG

SEQ ID NO: 2324 - protein, 277 aa, Synthetic construct
MFHYVDVGPRDGTPVLFLHGNPTSSYVWRNIIPHVAPTHRCIAPDLIGMGKSDKPDLGYFFDDHVRFMDAFIEALGLEEVVLVIHDWGSALGFHWAKRNPERVKGIAFMEFIRPIPTWDEWPEFARETFQAFRTTDVGRKLIIDQNVFIEGTLPMGVVRPLTEVEMDHYREPFLNPVDREPLWRFPNELPIQGEPANIVALVEEYMDWLHQSPVPKLLFWGTPGVLIPPAEAARLAKSLPNCKAVDIGPGLNLLQEDNPDLIGSEIARWLSTLEISG

SEQ ID NO: 2325 - protein, 277 aa, Synthetic construct
MFHYVDVGPRDGTPVLFLHGNPTSSYVWRNIIPHVAPTHRCIAPDLIGMGKSDKPDLGYFFDDHVRFMDAFIEALGLEEVVLVIHDWGSALGFHWAKRNPERVKGIAFMEFIRPIPTWDEWPEFARETFQAFRTTDVGRKLIIDQNVFIEGTLPMGVVRPLTEVEMDHYREPFLNPVDREPLWRFPNELPINGEPANIVALVEEYMDWLHQSPVPKLLFWGTPGVLIPPAEAARLAKSLPNCKAVDIGPGLNLLQEDNPDLIGSEIARWLSTLEISG

SEQ ID NO: 2326 - protein, 277 aa, Synthetic construct
MFHYVDVGPRDGTPVLFLHGNPTSSYVWRNIIPHVAPTHRCIAPDLIGMGKSDKPDLGYFFDDHVRFMDAFIEALGLEEVVLVIHDWGSALGFHWAKRNPERVKGIAFMEFIRPIPTWDEWPEFARETFQAFRTTDVGRKLIIDQNVFIEGTLPMGVVRPLTEVEMDHYREPFLNPVDREPLWRFPNELPIADEPANIVALVEEYMDWLHQSPVPKLLFWGTPGVLIPPAEAARLAKSLPNCKAVDIGPGLNLLQEDNPDLIGSEIARWLSTLEISG

SEQ ID NO: 2327 - protein, 277 aa, Synthetic construct
MFHYVDVGPRDGTPVLFLHGNPTSSYVWRNIIPHVAPTHRCIAPDLIGMGKSDKPDLGYFFDDHVRFMDAFIEALGLEEVVLVIHDWGSALGFHWAKRNPERVKGIAFMEFIRPIPTWDEWPEFARETFQAFRTTDVGRKLIIDQNVFIEGTLPMGVVRPLTEVEMDHYREPFLNPVDREPLWRFPNELPIANEPANIVALVEEYMDWLHQSPVPKLLFWGTPGVLIPPAEAARLAKSLPNCKAVDIGPGLNLLQEDNPDLIGSEIARWLSTLEISG

SEQ ID NO: 2328 - protein, 277 aa, Synthetic construct
MFHYVDVGPRDGTPVLFLHGNPTSSYVWRNIIPHVAPTHRCIAPDLIGMGKSDKPDLGYFFDDHVRFMDAFIEALGLEEVVLVIHDWGSALGFHWAKRNPERVKGIAFMEFIRPIPTWDEWPEFARETFQAFRTTDVGRKLIIDQNVFIEGTLPMGVVRPLTEVEMDHYREPFLNPVDREPLWRFPNELPIAEEPANIVALVEEYMDWLHQSPVPKLLFWGTPGVLIPPAEAARLAKSLPNCKAVDIGPGLNLLQEDNPDLIGSEIARWLSTLEISG

SEQ ID NO: 2329 - protein, 277 aa, Synthetic construct
MFHYVDVGPRDGTPVLFLHGNPTSSYVWRNIIPHVAPTHRCIAPDLIGMGKSDKPDLGYFFDDHVRFMDAFIEALGLEEVVLVIHDWGSALGFHWAKRNPERVKGIAFMEFIRPIPTWDEWPEFARETFQAFRTTDVGRKLIIDQNVFIEGTLPMGVVRPLTEVEMDHYREPFLNPVDREPLWRFPNELPIAAEPANIVALVEEYMDWLHQSPVPKLLFWGTPGVLIPPAEAARLAKSLPNCKAVDIGPGLNLLQEDNPDLIGSEIARWLSTLEISG

SEQ ID NO: 2330 - protein, 277 aa, Synthetic construct
MFHYVDVGPRDGTPVLFLHGNPTSSYVWRNIIPHVAPTHRCIAPDLIGMGKSDKPDLGYFFDDHVRFMDAFIEALGLEEVVLVIHDWGSALGFHWAKRNPERVKGIAFMEFIRPIPTWDEWPEFARETFQAFRTTDVGRKLIIDQNVFIEGTLPMGVVRPLTEVEMDHYREPFLNPVDREPLWRFPNELPIASEPANIVALVEEYMDWLHQSPVPKLLFWGTPGVLIPPAEAARLAKSLPNCKAVDIGPGLNLLQEDNPDLIGSEIARWLSTLEISG

SEQ ID NO: 2331 - protein, 277 aa, Synthetic construct
MFHYVDVGPRDGTPVLFLHGNPTSSYVWRNIIPHVAPTHRCIAPDLIGMGKSDKPDLGYFFDDHVRFMDAFIEALGLEEVVLVIHDWGSALGFHWAKRNPERVKGIAFMEFIRPIPTWDEWPEFARETFQAFRTTDVGRKLIIDQNVFIEGTLPMGVVRPLTEVEMDHYREPFLNPVDREPLWRFPNELPIAREPANIVALVEEYMDWLHQSPVPKLLFWGTPGVLIPPAEAARLAKSLPNCKAVDIGPGLNLLQEDNPDLIGSEIARWLSTLEISG

SEQ ID NO: 2332 - protein, 277 aa, Synthetic construct
MFHYVDVGPRDGTPVLFLHGNPTSSYVWRNIIPHVAPTHRCIAPDLIGMGKSDKPDLGYFFDDHVRFMDAFIEALGLEEVVLVIHDWGSALGFHWAKRNPERVKGIAFMEFIRPIPTWDEWPEFARETFQAFRTTDVGRKLIIDQNVFIEGTLPMGVVRPLTEVEMDHYREPFLNPVDREPLWRFPNELPIAGDPANIVALVEEYMDWLHQSPVPKLLFWGTPGVLIPPAEAARLAKSLPNCKAVDIGPGLNLLQEDNPDLIGSEIARWLSTLEISG

SEQ ID NO: 2333 - protein, 277 aa, Synthetic construct
MFHYVDVGPRDGTPVLFLHGNPTSSYVWRNIIPHVAPTHRCIAPDLIGMGKSDKPDLGYFFDDHVRFMDAFIEALGLEEVVLVIHDWGSALGFHWAKRNPERVKGIAFMEFIRPIPTWDEWPEFARETFQAFRTTDVGRKLIIDQNVFIEGTLPMGVVRPLTEVEMDHYREPFLNPVDREPLWRFPNELPIAGQPANIVALVEEYMDWLHQSPVPKLLFWGTPGVLIPPAEAARLAKSLPNCKAVDIGPGLNLLQEDNPDLIGSEIARWLSTLEISG

SEQ ID NO: 2334 - protein, 277 aa, Synthetic construct
MFHYVDVGPRDGTPVLFLHGNPTSSYVWRNIIPHVAPTHRCIAPDLIGMGKSDKPDLGYFFDDHVRFMDAFIEALGLEEVVLVIHDWGSALGFHWAKRNPERVKGIAFMEFIRPIPTWDEWPEFARETFQAFRTTDVGRKLIIDQNVFIEGTLPMGVVRPLTEVEMDHYREPFLNPVDREPLWRFPNELPIAGAPANIVALVEEYMDWLHQSPVPKLLFWGTPGVLIPPAEAARLAKSLPNCKAVDIGPGLNLLQEDNPDLIGSEIARWLSTLEISG

SEQ ID NO: 2335 - protein, 277 aa, Synthetic construct
MFHYVDVGPRDGTPVLFLHGNPTSSYVWRNIIPHVAPTHRCIAPDLIGMGKSDKPDLGYFFDDHVRFMDAFIEALGLEEVVLVIHDWGSALGFHWAKRNPERVKGIAFMEFIRPIPTWDEWPEFARETFQAFRTTDVGRKLIIDQNVFIEGTLPMGVVRPLTEVEMDHYREPFLNPVDREPLWRFPNELPIAGTPANIVALVEEYMDWLHQSPVPKLLFWGTPGVLIPPAEAARLAKSLPNCKAVDIGPGLNLLQEDNPDLIGSEIARWLSTLEISG

SEQ ID NO: 2336 - protein, 277 aa, Synthetic construct
MFHYVDVGPRDGTPVLFLHGNPTSSYVWRNIIPHVAPTHRCIAPDLIGMGKSDKPDLGYFFDDHVRFMDAFIEALGLEEVVLVIHDWGSALGFHWAKRNPERVKGIAFMEFIRPIPTWDEWPEFARETFQAFRTTDVGRKLIIDQNVFIEGTLPMGVVRPLTEVEMDHYREPFLNPVDREPLWRFPNELPIAGKPANIVALVEEYMDWLHQSPVPKLLFWGTPGVLIPPAEAARLAKSLPNCKAVDIGPGLNLLQEDNPDLIGSEIARWLSTLEISG

SEQ ID NO: 2337 - protein, 277 aa, Synthetic construct
MFHYVDVGPRDGTPVLFLHGNPTSSYVWRNIIPHVAPTHRCIAPDLIGMGKSDKPDLGYFFDDHVRFMDAFIEALGLEEVVLVIHDWGSALGFHWAKRNPERVKGIAFMEFIRPIPTWDEWPEFARETFQAFRTTDVGRKLIIDQNVFIEGTLPMGVVRPLTEVEMDHYREPFLNPVDREPLWRFPNELPIAGSPANIVALVEEYMDWLHQSPVPKLLFWGTPGVLIPPAEAARLAKSLPNCKAVDIGPGLNLLQEDNPDLIGSEIARWLSTLEISG

SEQ ID NO: 2338 - protein, 277 aa, Synthetic construct
MFHYVDVGPRDGTPVLFLHGNPTSSYVWRNIIPHVAPTHRCIAPDLIGMGKSDKPDLGYFFDDHVRFMDAFIEALGLEEVVLVIHDWGSALGFHWAKRNPERVKGIAFMEFIRPIPTWDEWPEFARETFQAFRTTDVGRKLIIDQNVFIEGTLPMGVVRPLTEVEMDHYREPFLNPVDREPLWRFPNELPIAGEAANIVALVEEYMDWLHQSPVPKLLFWGTPGVLIPPAEAARLAKSLPNCKAVDIGPGLNLLQEDNPDLIGSEIARWLSTLEISG

SEQ ID NO: 2339 - protein, 277 aa, Synthetic construct
MFHYVDVGPRDGTPVLFLHGNPTSSYVWRNIIPHVAPTHRCIAPDLIGMGKSDKPDLGYFFDDHVRFMDAFIEALGLEEVVLVIHDWGSALGFHWAKRNPERVKGIAFMEFIRPIPTWDEWPEFARETFQAFRTTDVGRKLIIDQNVFIEGTLPMGVVRPLTEVEMDHYREPFLNPVDREPLWRFPNELPIAGESANIVALVEEYMDWLHQSPVPKLLFWGTPGVLIPPAEAARLAKSLPNCKAVDIGPGLNLLQEDNPDLIGSEIARWLSTLEISG

SEQ ID NO: 2340 - protein, 277 aa, Synthetic construct
MFHYVDVGPRDGTPVLFLHGNPTSSYVWRNIIPHVAPTHRCIAPDLIGMGKSDKPDLGYFFDDHVRFMDAFIEALGLEEVVLVIHDWGSALGFHWAKRNPERVKGIAFMEFIRPIPTWDEWPEFARETFQAFRTTDVGRKLIIDQNVFIEGTLPMGVVRPLTEVEMDHYREPFLNPVDREPLWRFPNELPIAGETANIVALVEEYMDWLHQSPVPKLLFWGTPGVLIPPAEAARLAKSLPNCKAVDIGPGLNLLQEDNPDLIGSEIARWLSTLEISG

SEQ ID NO: 2341 - protein, 277 aa, Synthetic construct
MFHYVDVGPRDGTPVLFLHGNPTSSYVWRNIIPHVAPTHRCIAPDLIGMGKSDKPDLGYFFDDHVRFMDAFIEALGLEEVVLVIHDWGSALGFHWAKRNPERVKGIAFMEFIRPIPTWDEWPEFARETFQAFRTTDVGRKLIIDQNVFIEGTLPMGVVRPLTEVEMDHYREPFLNPVDREPLWRFPNELPIAGEEANIVALVEEYMDWLHQSPVPKLLFWGTPGVLIPPAEAARLAKSLPNCKAVDIGPGLNLLQEDNPDLIGSEIARWLSTLEISG

SEQ ID NO: 2342 - protein, 277 aa, Synthetic construct
MFHYVDVGPRDGTPVLFLHGNPTSSYVWRNIIPHVAPTHRCIAPDLIGMGKSDKPDLGYFFDDHVRFMDAFIEALGLEEVVLVIHDWGSALGFHWAKRNPERVKGIAFMEFIRPIPTWDEWPEFARETFQAFRTTDVGRKLIIDQNVFIEGTLPMGVVRPLTEVEMDHYREPFLNPVDREPLWRFPNELPIAGEQANIVALVEEYMDWLHQSPVPKLLFWGTPGVLIPPAEAARLAKSLPNCKAVDIGPGLNLLQEDNPDLIGSEIARWLSTLEISG

SEQ ID NO: 2343 - protein, 277 aa, Synthetic construct
MFHYVDVGPRDGTPVLFLHGNPTSSYVWRNIIPHVAPTHRCIAPDLIGMGKSDKPDLGYFFDDHVRFMDAFIEALGLEEVVLVIHDWGSALGFHWAKRNPERVKGIAFMEFIRPIPTWDEWPEFARETFQAFRTTDVGRKLIIDQNVFIEGTLPMGVVRPLTEVEMDHYREPFLNPVDREPLWRFPNELPIAGEGANIVALVEEYMDWLHQSPVPKLLFWGTPGVLIPPAEAARLAKSLPNCKAVDIGPGLNLLQEDNPDLIGSEIARWLSTLEISG

SEQ ID NO: 2344 - protein, 277 aa, Synthetic construct
MFHYVDVGPRDGTPVLFLHGNPTSSYVWRNIIPHVAPTHRCIAPDLIGMGKSDKPDLGYFFDDHVRFMDAFIEALGLEEVVLVIHDWGSALGFHWAKRNPERVKGIAFMEFIRPIPTWDEWPEFARETFQAFRTTDVGRKLIIDQNVFIEGTLPMGVVRPLTEVEMDHYREPFLNPVDREPLWRFPNELPIAGEPENIVALVEEYMDWLHQSPVPKLLFWGTPGVLIPPAEAARLAKSLPNCKAVDIGPGLNLLQEDNPDLIGSEIARWLSTLEISG

SEQ ID NO: 2345 - protein, 277 aa, Synthetic construct
MFHYVDVGPRDGTPVLFLHGNPTSSYVWRNIIPHVAPTHRCIAPDLIGMGKSDKPDLGYFFDDHVRFMDAFIEALGLEEVVLVIHDWGSALGFHWAKRNPERVKGIAFMEFIRPIPTWDEWPEFARETFQAFRTTDVGRKLIIDQNVFIEGTLPMGVVRPLTEVEMDHYREPFLNPVDREPLWRFPNELPIAGEPDNIVALVEEYMDWLHQSPVPKLLFWGTPGVLIPPAEAARLAKSLPNCKAVDIGPGLNLLQEDNPDLIGSEIARWLSTLEISG

SEQ ID NO: 2346 - protein, 277 aa, Synthetic construct
MFHYVDVGPRDGTPVLFLHGNPTSSYVWRNIIPHVAPTHRCIAPDLIGMGKSDKPDLGYFFDDHVRFMDAFIEALGLEEVVLVIHDWGSALGFHWAKRNPERVKGIAFMEFIRPIPTWDEWPEFARETFQAFRTTDVGRKLIIDQNVFIEGTLPMGVVRPLTEVEMDHYREPFLNPVDREPLWRFPNELPIAGEPPNIVALVEEYMDWLHQSPVPKLLFWGTPGVLIPPAEAARLAKSLPNCKAVDIGPGLNLLQEDNPDLIGSEIARWLSTLEISG

SEQ ID NO: 2347 - protein, 277 aa, Synthetic construct
MFHYVDVGPRDGTPVLFLHGNPTSSYVWRNIIPHVAPTHRCIAPDLIGMGKSDKPDLGYFFDDHVRFMDAFIEALGLEEVVLVIHDWGSALGFHWAKRNPERVKGIAFMEFIRPIPTWDEWPEFARETFQAFRTTDVGRKLIIDQNVFIEGTLPMGVVRPLTEVEMDHYREPFLNPVDREPLWRFPNELPIAGEPSNIVALVEEYMDWLHQSPVPKLLFWGTPGVLIPPAEAARLAKSLPNCKAVDIGPGLNLLQEDNPDLIGSEIARWLSTLEISG

SEQ ID NO: 2348 - protein, 277 aa, Synthetic construct
MFHYVDVGPRDGTPVLFLHGNPTSSYVWRNIIPHVAPTHRCIAPDLIGMGKSDKPDLGYFFDDHVRFMDAFIEALGLEEVVLVIHDWGSALGFHWAKRNPERVKGIAFMEFIRPIPTWDEWPEFARETFQAFRTTDVGRKLIIDQNVFIEGTLPMGVVRPLTEVEMDHYREPFLNPVDREPLWRFPNELPIAGEPKNIVALVEEYMDWLHQSPVPKLLFWGTPGVLIPPAEAARLAKSLPNCKAVDIGPGLNLLQEDNPDLIGSEIARWLSTLEISG

SEQ ID NO: 2349 - protein, 277 aa, Synthetic construct
MFHYVDVGPRDGTPVLFLHGNPTSSYVWRNIIPHVAPTHRCIAPDLIGMGKSDKPDLGYFFDDHVRFMDAFIEALGLEEVVLVIHDWGSALGFHWAKRNPERVKGIAFMEFIRPIPTWDEWPEFARETFQAFRTTDVGRKLIIDQNVFIEGTLPMGVVRPLTEVEMDHYREPFLNPVDREPLWRFPNELPIAGEPQNIVALVEEYMDWLHQSPVPKLLFWGTPGVLIPPAEAARLAKSLPNCKAVDIGPGLNLLQEDNPDLIGSEIARWLSTLEISG

SEQ ID NO: 2350 - protein, 277 aa, Synthetic construct
MFHYVDVGPRDGTPVLFLHGNPTSSYVWRNIIPHVAPTHRCIAPDLIGMGKSDKPDLGYFFDDHVRFMDAFIEALGLEEVVLVIHDWGSALGFHWAKRNPERVKGIAFMEFIRPIPTWDEWPEFARETFQAFRTTDVGRKLIIDQNVFIEGTLPMGVVRPLTEVEMDHYREPFLNPVDREPLWRFPNELPIAGEPADIVALVEEYMDWLHQSPVPKLLFWGTPGVLIPPAEAARLAKSLPNCKAVDIGPGLNLLQEDNPDLIGSEIARWLSTLEISG

SEQ ID NO: 2351 - protein, 277 aa, Synthetic construct
MFHYVDVGPRDGTPVLFLHGNPTSSYVWRNIIPHVAPTHRCIAPDLIGMGKSDKPDLGYFFDDHVRFMDAFIEALGLEEVVLVIHDWGSALGFHWAKRNPERVKGIAFMEFIRPIPTWDEWPEFARETFQAFRTTDVGRKLIIDQNVFIEGTLPMGVVRPLTEVEMDHYREPFLNPVDREPLWRFPNELPIAGEPAEIVALVEEYMDWLHQSPVPKLLFWGTPGVLIPPAEAARLAKSLPNCKAVDIGPGLNLLQEDNPDLIGSEIARWLSTLEISG

SEQ ID NO: 2352 - protein, 277 aa, Synthetic construct
MFHYVDVGPRDGTPVLFLHGNPTSSYVWRNIIPHVAPTHRCIAPDLIGMGKSDKPDLGYFFDDHVRFMDAFIEALGLEEVVLVIHDWGSALGFHWAKRNPERVKGIAFMEFIRPIPTWDEWPEFARETFQAFRTTDVGRKLIIDQNVFIEGTLPMGVVRPLTEVEMDHYREPFLNPVDREPLWRFPNELPIAGEPAAIVALVEEYMDWLHQSPVPKLLFWGTPGVLIPPAEAARLAKSLPNCKAVDIGPGLNLLQEDNPDLIGSEIARWLSTLEISG

SEQ ID NO: 2353 - protein, 277 aa, Synthetic construct
MFHYVDVGPRDGTPVLFLHGNPTSSYVWRNIIPHVAPTHRCIAPDLIGMGKSDKPDLGYFFDDHVRFMDAFIEALGLEEVVLVIHDWGSALGFHWAKRNPERVKGIAFMEFIRPIPTWDEWPEFARETFQAFRTTDVGRKLIIDQNVFIEGTLPMGVVRPLTEVEMDHYREPFLNPVDREPLWRFPNELPIAGEPASIVALVEEYMDWLHQSPVPKLLFWGTPGVLIPPAEAARLAKSLPNCKAVDIGPGLNLLQEDNPDLIGSEIARWLSTLEISG

SEQ ID NO: 2354 - protein, 277 aa, Synthetic construct
MFHYVDVGPRDGTPVLFLHGNPTSSYVWRNIIPHVAPTHRCIAPDLIGMGKSDKPDLGYFFDDHVRFMDAFIEALGLEEVVLVIHDWGSALGFHWAKRNPERVKGIAFMEFIRPIPTWDEWPEFARETFQAFRTTDVGRKLIIDQNVFIEGTLPMGVVRPLTEVEMDHYREPFLNPVDREPLWRFPNELPIAGEPAHIVALVEEYMDWLHQSPVPKLLFWGTPGVLIPPAEAARLAKSLPNCKAVDIGPGLNLLQEDNPDLIGSEIARWLSTLEISG

SEQ ID NO: 2355 - protein, 277 aa, Synthetic construct
MFHYVDVGPRDGTPVLFLHGNPTSSYVWRNIIPHVAPTHRCIAPDLIGMGKSDKPDLGYFFDDHVRFMDAFIEALGLEEVVLVIHDWGSALGFHWAKRNPERVKGIAFMEFIRPIPTWDEWPEFARETFQAFRTTDVGRKLIIDQNVFIEGTLPMGVVRPLTEVEMDHYREPFLNPVDREPLWRFPNELPIAGEPAQIVALVEEYMDWLHQSPVPKLLFWGTPGVLIPPAEAARLAKSLPNCKAVDIGPGLNLLQEDNPDLIGSEIARWLSTLEISG

SEQ ID NO: 2356 - protein, 277 aa, Synthetic construct
MFHYVDVGPRDGTPVLFLHGNPTSSYVWRNIIPHVAPTHRCIAPDLIGMGKSDKPDLGYFFDDHVRFMDAFIEALGLEEVVLVIHDWGSALGFHWAKRNPERVKGIAFMEFIRPIPTWDEWPEFARETFQAFRTTDVGRKLIIDQNVFIEGTLPMGVVRPLTEVEMDHYREPFLNPVDREPLWRFPNELPIAGEPANVVALVEEYMDWLHQSPVPKLLFWGTPGVLIPPAEAARLAKSLPNCKAVDIGPGLNLLQEDNPDLIGSEIARWLSTLEISG

SEQ ID NO: 2357 - protein, 277 aa, Synthetic construct
MFHYVDVGPRDGTPVLFLHGNPTSSYVWRNIIPHVAPTHRCIAPDLIGMGKSDKPDLGYFFDDHVRFMDAFIEALGLEEVVLVIHDWGSALGFHWAKRNPERVKGIAFMEFIRPIPTWDEWPEFARETFQAFRTTDVGRKLIIDQNVFIEGTLPMGVVRPLTEVEMDHYREPFLNPVDREPLWRFPNELPIAGEPANTVALVEEYMDWLHQSPVPKLLFWGTPGVLIPPAEAARLAKSLPNCKAVDIGPGLNLLQEDNPDLIGSEIARWLSTLEISG

SEQ ID NO: 2358 - protein, 277 aa, Synthetic construct
MFHYVDVGPRDGTPVLFLHGNPTSSYVWRNIIPHVAPTHRCIAPDLIGMGKSDKPDLGYFFDDHVRFMDAFIEALGLEEVVLVIHDWGSALGFHWAKRNPERVKGIAFMEFIRPIPTWDEWPEFARETFQAFRTTDVGRKLIIDQNVFIEGTLPMGVVRPLTEVEMDHYREPFLNPVDREPLWRFPNELPIAGEPANAVALVEEYMDWLHQSPVPKLLFWGTPGVLIPPAEAARLAKSLPNCKAVDIGPGLNLLQEDNPDLIGSEIARWLSTLEISG

SEQ ID NO: 2359 - protein, 277 aa, Synthetic construct
MFHYVDVGPRDGTPVLFLHGNPTSSYVWRNIIPHVAPTHRCIAPDLIGMGKSDKPDLGYFFDDHVRFMDAFIEALGLEEVVLVIHDWGSALGFHWAKRNPERVKGIAFMEFIRPIPTWDEWPEFARETFQAFRTTDVGRKLIIDQNVFIEGTLPMGVVRPLTEVEMDHYREPFLNPVDREPLWRFPNELPIAGEPANLVALVEEYMDWLHQSPVPKLLFWGTPGVLIPPAEAARLAKSLPNCKAVDIGPGLNLLQEDNPDLIGSEIARWLSTLEISG

SEQ ID NO: 2360 - protein, 277 aa, Synthetic construct
MFHYVDVGPRDGTPVLFLHGNPTSSYVWRNIIPHVAPTHRCIAPDLIGMGKSDKPDLGYFFDDHVRFMDAFIEALGLEEVVLVIHDWGSALGFHWAKRNPERVKGIAFMEFIRPIPTWDEWPEFARETFQAFRTTDVGRKLIIDQNVFIEGTLPMGVVRPLTEVEMDHYREPFLNPVDREPLWRFPNELPIAGEPANSVALVEEYMDWLHQSPVPKLLFWGTPGVLIPPAEAARLAKSLPNCKAVDIGPGLNLLQEDNPDLIGSEIARWLSTLEISG

SEQ ID NO: 2361 - protein, 277 aa, Synthetic construct
MFHYVDVGPRDGTPVLFLHGNPTSSYVWRNIIPHVAPTHRCIAPDLIGMGKSDKPDLGYFFDDHVRFMDAFIEALGLEEVVLVIHDWGSALGFHWAKRNPERVKGIAFMEFIRPIPTWDEWPEFARETFQAFRTTDVGRKLIIDQNVFIEGTLPMGVVRPLTEVEMDHYREPFLNPVDREPLWRFPNELPIAGEPANMVALVEEYMDWLHQSPVPKLLFWGTPGVLIPPAEAARLAKSLPNCKAVDIGPGLNLLQEDNPDLIGSEIARWLSTLEISG

SEQ ID NO: 2362 - protein, 277 aa, Synthetic construct
MFHYVDVGPRDGTPVLFLHGNPTSSYVWRNIIPHVAPTHRCIAPDLIGMGKSDKPDLGYFFDDHVRFMDAFIEALGLEEVVLVIHDWGSALGFHWAKRNPERVKGIAFMEFIRPIPTWDEWPEFARETFQAFRTTDVGRKLIIDQNVFIEGTLPMGVVRPLTEVEMDHYREPFLNPVDREPLWRFPNELPIAGEPANITALVEEYMDWLHQSPVPKLLFWGTPGVLIPPAEAARLAKSLPNCKAVDIGPGLNLLQEDNPDLIGSEIARWLSTLEISG

SEQ ID NO: 2363 - protein, 277 aa, Synthetic construct
MFHYVDVGPRDGTPVLFLHGNPTSSYVWRNIIPHVAPTHRCIAPDLIGMGKSDKPDLGYFFDDHVRFMDAFIEALGLEEVVLVIHDWGSALGFHWAKRNPERVKGIAFMEFIRPIPTWDEWPEFARETFQAFRTTDVGRKLIIDQNVFIEGTLPMGVVRPLTEVEMDHYREPFLNPVDREPLWRFPNELPIAGEPANIAALVEEYMDWLHQSPVPKLLFWGTPGVLIPPAEAARLAKSLPNCKAVDIGPGLNLLQEDNPDLIGSEIARWLSTLEISG

SEQ ID NO: 2364 - protein, 277 aa, Synthetic construct
MFHYVDVGPRDGTPVLFLHGNPTSSYVWRNIIPHVAPTHRCIAPDLIGMGKSDKPDLGYFFDDHVRFMDAFIEALGLEEVVLVIHDWGSALGFHWAKRNPERVKGIAFMEFIRPIPTWDEWPEFARETFQAFRTTDVGRKLIIDQNVFIEGTLPMGVVRPLTEVEMDHYREPFLNPVDREPLWRFPNELPIAGEPANIIALVEEYMDWLHQSPVPKLLFWGTPGVLIPPAEAARLAKSLPNCKAVDIGPGLNLLQEDNPDLIGSEIARWLSTLEISG

SEQ ID NO: 2365 - protein, 277 aa, Synthetic construct
MFHYVDVGPRDGTPVLFLHGNPTSSYVWRNIIPHVAPTHRCIAPDLIGMGKSDKPDLGYFFDDHVRFMDAFIEALGLEEVVLVIHDWGSALGFHWAKRNPERVKGIAFMEFIRPIPTWDEWPEFARETFQAFRTTDVGRKLIIDQNVFIEGTLPMGVVRPLTEVEMDHYREPFLNPVDREPLWRFPNELPIAGEPANILALVEEYMDWLHQSPVPKLLFWGTPGVLIPPAEAARLAKSLPNCKAVDIGPGLNLLQEDNPDLIGSEIARWLSTLEISG

SEQ ID NO: 2366 - protein, 277 aa, Synthetic construct
MFHYVDVGPRDGTPVLFLHGNPTSSYVWRNIIPHVAPTHRCIAPDLIGMGKSDKPDLGYFFDDHVRFMDAFIEALGLEEVVLVIHDWGSALGFHWAKRNPERVKGIAFMEFIRPIPTWDEWPEFARETFQAFRTTDVGRKLIIDQNVFIEGTLPMGVVRPLTEVEMDHYREPFLNPVDREPLWRFPNELPIAGEPANISALVEEYMDWLHQSPVPKLLFWGTPGVLIPPAEAARLAKSLPNCKAVDIGPGLNLLQEDNPDLIGSEIARWLSTLEISG

SEQ ID NO: 2367 - protein, 277 aa, Synthetic construct
MFHYVDVGPRDGTPVLFLHGNPTSSYVWRNIIPHVAPTHRCIAPDLIGMGKSDKPDLGYFFDDHVRFMDAFIEALGLEEVVLVIHDWGSALGFHWAKRNPERVKGIAFMEFIRPIPTWDEWPEFARETFQAFRTTDVGRKLIIDQNVFIEGTLPMGVVRPLTEVEMDHYREPFLNPVDREPLWRFPNELPIAGEPANIRALVEEYMDWLHQSPVPKLLFWGTPGVLIPPAEAARLAKSLPNCKAVDIGPGLNLLQEDNPDLIGSEIARWLSTLEISG

SEQ ID NO: 2368 - protein, 277 aa, Synthetic construct
MFHYVDVGPRDGTPVLFLHGNPTSSYVWRNIIPHVAPTHRCIAPDLIGMGKSDKPDLGYFFDDHVRFMDAFIEALGLEEVVLVIHDWGSALGFHWAKRNPERVKGIAFMEFIRPIPTWDEWPEFARETFQAFRTTDVGRKLIIDQNVFIEGTLPMGVVRPLTEVEMDHYREPFLNPVDREPLWRFPNELPIAGEPANIVRLVEEYMDWLHQSPVPKLLFWGTPGVLIPPAEAARLAKSLPNCKAVDIGPGLNLLQEDNPDLIGSEIARWLSTLEISG

SEQ ID NO: 2369 - protein, 277 aa, Synthetic construct
MFHYVDVGPRDGTPVLFLHGNPTSSYVWRNIIPHVAPTHRCIAPDLIGMGKSDKPDLGYFFDDHVRFMDAFIEALGLEEVVLVIHDWGSALGFHWAKRNPERVKGIAFMEFIRPIPTWDEWPEFARETFQAFRTTDVGRKLIIDQNVFIEGTLPMGVVRPLTEVEMDHYREPFLNPVDREPLWRFPNELPIAGEPANIVKLVEEYMDWLHQSPVPKLLFWGTPGVLIPPAEAARLAKSLPNCKAVDIGPGLNLLQEDNPDLIGSEIARWLSTLEISG

SEQ ID NO: 2370 - protein, 277 aa, Synthetic construct
MFHYVDVGPRDGTPVLFLHGNPTSSYVWRNIIPHVAPTHRCIAPDLIGMGKSDKPDLGYFFDDHVRFMDAFIEALGLEEVVLVIHDWGSALGFHWAKRNPERVKGIAFMEFIRPIPTWDEWPEFARETFQAFRTTDVGRKLIIDQNVFIEGTLPMGVVRPLTEVEMDHYREPFLNPVDREPLWRFPNELPIAGEPANIVELVEEYMDWLHQSPVPKLLFWGTPGVLIPPAEAARLAKSLPNCKAVDIGPGLNLLQEDNPDLIGSEIARWLSTLEISG

SEQ ID NO: 2371 - protein, 277 aa, Synthetic construct
MFHYVDVGPRDGTPVLFLHGNPTSSYVWRNIIPHVAPTHRCIAPDLIGMGKSDKPDLGYFFDDHVRFMDAFIEALGLEEVVLVIHDWGSALGFHWAKRNPERVKGIAFMEFIRPIPTWDEWPEFARETFQAFRTTDVGRKLIIDQNVFIEGTLPMGVVRPLTEVEMDHYREPFLNPVDREPLWRFPNELPIAGEPANIVPLVEEYMDWLHQSPVPKLLFWGTPGVLIPPAEAARLAKSLPNCKAVDIGPGLNLLQEDNPDLIGSEIARWLSTLEISG

SEQ ID NO: 2372 - protein, 277 aa, Synthetic construct
MFHYVDVGPRDGTPVLFLHGNPTSSYVWRNIIPHVAPTHRCIAPDLIGMGKSDKPDLGYFFDDHVRFMDAFIEALGLEEVVLVIHDWGSALGFHWAKRNPERVKGIAFMEFIRPIPTWDEWPEFARETFQAFRTTDVGRKLIIDQNVFIEGTLPMGVVRPLTEVEMDHYREPFLNPVDREPLWRFPNELPIAGEPANIVSLVEEYMDWLHQSPVPKLLFWGTPGVLIPPAEAARLAKSLPNCKAVDIGPGLNLLQEDNPDLIGSEIARWLSTLEISG

SEQ ID NO: 2373 - protein, 277 aa, Synthetic construct
MFHYVDVGPRDGTPVLFLHGNPTSSYVWRNIIPHVAPTHRCIAPDLIGMGKSDKPDLGYFFDDHVRFMDAFIEALGLEEVVLVIHDWGSALGFHWAKRNPERVKGIAFMEFIRPIPTWDEWPEFARETFQAFRTTDVGRKLIIDQNVFIEGTLPMGVVRPLTEVEMDHYREPFLNPVDREPLWRFPNELPIAGEPANIVGLVEEYMDWLHQSPVPKLLFWGTPGVLIPPAEAARLAKSLPNCKAVDIGPGLNLLQEDNPDLIGSEIARWLSTLEISG

SEQ ID NO: 2374 - protein, 277 aa, Synthetic construct
MFHYVDVGPRDGTPVLFLHGNPTSSYVWRNIIPHVAPTHRCIAPDLIGMGKSDKPDLGYFFDDHVRFMDAFIEALGLEEVVLVIHDWGSALGFHWAKRNPERVKGIAFMEFIRPIPTWDEWPEFARETFQAFRTTDVGRKLIIDQNVFIEGTLPMGVVRPLTEVEMDHYREPFLNPVDREPLWRFPNELPIAGEPANIVAIVEEYMDWLHQSPVPKLLFWGTPGVLIPPAEAARLAKSLPNCKAVDIGPGLNLLQEDNPDLIGSEIARWLSTLEISG

SEQ ID NO: 2375 - protein, 277 aa, Synthetic construct
MFHYVDVGPRDGTPVLFLHGNPTSSYVWRNIIPHVAPTHRCIAPDLIGMGKSDKPDLGYFFDDHVRFMDAFIEALGLEEVVLVIHDWGSALGFHWAKRNPERVKGIAFMEFIRPIPTWDEWPEFARETFQAFRTTDVGRKLIIDQNVFIEGTLPMGVVRPLTEVEMDHYREPFLNPVDREPLWRFPNELPIAGEPANIVAVVEEYMDWLHQSPVPKLLFWGTPGVLIPPAEAARLAKSLPNCKAVDIGPGLNLLQEDNPDLIGSEIARWLSTLEISG

SEQ ID NO: 2376 - protein, 277 aa, Synthetic construct
MFHYVDVGPRDGTPVLFLHGNPTSSYVWRNIIPHVAPTHRCIAPDLIGMGKSDKPDLGYFFDDHVRFMDAFIEALGLEEVVLVIHDWGSALGFHWAKRNPERVKGIAFMEFIRPIPTWDEWPEFARETFQAFRTTDVGRKLIIDQNVFIEGTLPMGVVRPLTEVEMDHYREPFLNPVDREPLWRFPNELPIAGEPANIVARVEEYMDWLHQSPVPKLLFWGTPGVLIPPAEAARLAKSLPNCKAVDIGPGLNLLQEDNPDLIGSEIARWLSTLEISG

SEQ ID NO: 2377 - protein, 277 aa, Synthetic construct
MFHYVDVGPRDGTPVLFLHGNPTSSYVWRNIIPHVAPTHRCIAPDLIGMGKSDKPDLGYFFDDHVRFMDAFIEALGLEEVVLVIHDWGSALGFHWAKRNPERVKGIAFMEFIRPIPTWDEWPEFARETFQAFRTTDVGRKLIIDQNVFIEGTLPMGVVRPLTEVEMDHYREPFLNPVDREPLWRFPNELPIAGEPANIVAAVEEYMDWLHQSPVPKLLFWGTPGVLIPPAEAARLAKSLPNCKAVDIGPGLNLLQEDNPDLIGSEIARWLSTLEISG

SEQ ID NO: 2378 - protein, 277 aa, Synthetic construct
MFHYVDVGPRDGTPVLFLHGNPTSSYVWRNIIPHVAPTHRCIAPDLIGMGKSDKPDLGYFFDDHVRFMDAFIEALGLEEVVLVIHDWGSALGFHWAKRNPERVKGIAFMEFIRPIPTWDEWPEFARETFQAFRTTDVGRKLIIDQNVFIEGTLPMGVVRPLTEVEMDHYREPFLNPVDREPLWRFPNELPIAGEPANIVATVEEYMDWLHQSPVPKLLFWGTPGVLIPPAEAARLAKSLPNCKAVDIGPGLNLLQEDNPDLIGSEIARWLSTLEISG

SEQ ID NO: 2379 - protein, 277 aa, Synthetic construct
MFHYVDVGPRDGTPVLFLHGNPTSSYVWRNIIPHVAPTHRCIAPDLIGMGKSDKPDLGYFFDDHVRFMDAFIEALGLEEVVLVIHDWGSALGFHWAKRNPERVKGIAFMEFIRPIPTWDEWPEFARETFQAFRTTDVGRKLIIDQNVFIEGTLPMGVVRPLTEVEMDHYREPFLNPVDREPLWRFPNELPIAGEPANIVAKVEEYMDWLHQSPVPKLLFWGTPGVLIPPAEAARLAKSLPNCKAVDIGPGLNLLQEDNPDLIGSEIARWLSTLEISG

SEQ ID NO: 2380 - protein, 277 aa, Synthetic construct
MFHYVDVGPRDGTPVLFLHGNPTSSYVWRNIIPHVAPTHRCIAPDLIGMGKSDKPDLGYFFDDHVRFMDAFIEALGLEEVVLVIHDWGSALGFHWAKRNPERVKGIAFMEFIRPIPTWDEWPEFARETFQAFRTTDVGRKLIIDQNVFIEGTLPMGVVRPLTEVEMDHYREPFLNPVDREPLWRFPNELPIAGEPANIVALIEEYMDWLHQSPVPKLLFWGTPGVLIPPAEAARLAKSLPNCKAVDIGPGLNLLQEDNPDLIGSEIARWLSTLEISG

SEQ ID NO: 2381 - protein, 277 aa, Synthetic construct
MFHYVDVGPRDGTPVLFLHGNPTSSYVWRNIIPHVAPTHRCIAPDLIGMGKSDKPDLGYFFDDHVRFMDAFIEALGLEEVVLVIHDWGSALGFHWAKRNPERVKGIAFMEFIRPIPTWDEWPEFARETFQAFRTTDVGRKLIIDQNVFIEGTLPMGVVRPLTEVEMDHYREPFLNPVDREPLWRFPNELPIAGEPANIVALTEEYMDWLHQSPVPKLLFWGTPGVLIPPAEAARLAKSLPNCKAVDIGPGLNLLQEDNPDLIGSEIARWLSTLEISG

SEQ ID NO: 2382 - protein, 277 aa, Synthetic construct
MFHYVDVGPRDGTPVLFLHGNPTSSYVWRNIIPHVAPTHRCIAPDLIGMGKSDKPDLGYFFDDHVRFMDAFIEALGLEEVVLVIHDWGSALGFHWAKRNPERVKGIAFMEFIRPIPTWDEWPEFARETFQAFRTTDVGRKLIIDQNVFIEGTLPMGVVRPLTEVEMDHYREPFLNPVDREPLWRFPNELPIAGEPANIVALAEEYMDWLHQSPVPKLLFWGTPGVLIPPAEAARLAKSLPNCKAVDIGPGLNLLQEDNPDLIGSEIARWLSTLEISG

SEQ ID NO: 2383 - protein, 277 aa, Synthetic construct
MFHYVDVGPRDGTPVLFLHGNPTSSYVWRNIIPHVAPTHRCIAPDLIGMGKSDKPDLGYFFDDHVRFMDAFIEALGLEEVVLVIHDWGSALGFHWAKRNPERVKGIAFMEFIRPIPTWDEWPEFARETFQAFRTTDVGRKLIIDQNVFIEGTLPMGVVRPLTEVEMDHYREPFLNPVDREPLWRFPNELPIAGEPANIVALLEEYMDWLHQSPVPKLLFWGTPGVLIPPAEAARLAKSLPNCKAVDIGPGLNLLQEDNPDLIGSEIARWLSTLEISG

SEQ ID NO: 2384 - protein, 277 aa, Synthetic construct
MFHYVDVGPRDGTPVLFLHGNPTSSYVWRNIIPHVAPTHRCIAPDLIGMGKSDKPDLGYFFDDHVRFMDAFIEALGLEEVVLVIHDWGSALGFHWAKRNPERVKGIAFMEFIRPIPTWDEWPEFARETFQAFRTTDVGRKLIIDQNVFIEGTLPMGVVRPLTEVEMDHYREPFLNPVDREPLWRFPNELPIAGEPANIVALMEEYMDWLHQSPVPKLLFWGTPGVLIPPAEAARLAKSLPNCKAVDIGPGLNLLQEDNPDLIGSEIARWLSTLEISG

SEQ ID NO: 2385 - protein, 277 aa, Synthetic construct
MFHYVDVGPRDGTPVLFLHGNPTSSYVWRNIIPHVAPTHRCIAPDLIGMGKSDKPDLGYFFDDHVRFMDAFIEALGLEEVVLVIHDWGSALGFHWAKRNPERVKGIAFMEFIRPIPTWDEWPEFARETFQAFRTTDVGRKLIIDQNVFIEGTLPMGVVRPLTEVEMDHYREPFLNPVDREPLWRFPNELPIAGEPANIVALSEEYMDWLHQSPVPKLLFWGTPGVLIPPAEAARLAKSLPNCKAVDIGPGLNLLQEDNPDLIGSEIARWLSTLEISG

SEQ ID NO: 2386 - protein, 277 aa, Synthetic construct
MFHYVDVGPRDGTPVLFLHGNPTSSYVWRNIIPHVAPTHRCIAPDLIGMGKSDKPDLGYFFDDHVRFMDAFIEALGLEEVVLVIHDWGSALGFHWAKRNPERVKGIAFMEFIRPIPTWDEWPEFARETFQAFRTTDVGRKLIIDQNVFIEGTLPMGVVRPLTEVEMDHYREPFLNPVDREPLWRFPNELPIAGEPANIVALVDEYMDWLHQSPVPKLLFWGTPGVLIPPAEAARLAKSLPNCKAVDIGPGLNLLQEDNPDLIGSEIARWLSTLEISG

SEQ ID NO: 2387 - protein, 277 aa, Synthetic construct
MFHYVDVGPRDGTPVLFLHGNPTSSYVWRNIIPHVAPTHRCIAPDLIGMGKSDKPDLGYFFDDHVRFMDAFIEALGLEEVVLVIHDWGSALGFHWAKRNPERVKGIAFMEFIRPIPTWDEWPEFARETFQAFRTTDVGRKLIIDQNVFIEGTLPMGVVRPLTEVEMDHYREPFLNPVDREPLWRFPNELPIAGEPANIVALVAEYMDWLHQSPVPKLLFWGTPGVLIPPAEAARLAKSLPNCKAVDIGPGLNLLQEDNPDLIGSEIARWLSTLEISG

SEQ ID NO: 2388 - protein, 277 aa, Synthetic construct
MFHYVDVGPRDGTPVLFLHGNPTSSYVWRNIIPHVAPTHRCIAPDLIGMGKSDKPDLGYFFDDHVRFMDAFIEALGLEEVVLVIHDWGSALGFHWAKRNPERVKGIAFMEFIRPIPTWDEWPEFARETFQAFRTTDVGRKLIIDQNVFIEGTLPMGVVRPLTEVEMDHYREPFLNPVDREPLWRFPNELPIAGEPANIVALVQEYMDWLHQSPVPKLLFWGTPGVLIPPAEAARLAKSLPNCKAVDIGPGLNLLQEDNPDLIGSEIARWLSTLEISG

SEQ ID NO: 2389 - protein, 277 aa, Synthetic construct
MFHYVDVGPRDGTPVLFLHGNPTSSYVWRNIIPHVAPTHRCIAPDLIGMGKSDKPDLGYFFDDHVRFMDAFIEALGLEEVVLVIHDWGSALGFHWAKRNPERVKGIAFMEFIRPIPTWDEWPEFARETFQAFRTTDVGRKLIIDQNVFIEGTLPMGVVRPLTEVEMDHYREPFLNPVDREPLWRFPNELPIAGEPANIVALVNEYMDWLHQSPVPKLLFWGTPGVLIPPAEAARLAKSLPNCKAVDIGPGLNLLQEDNPDLIGSEIARWLSTLEISG

SEQ ID NO: 2390 - protein, 277 aa, Synthetic construct
MFHYVDVGPRDGTPVLFLHGNPTSSYVWRNIIPHVAPTHRCIAPDLIGMGKSDKPDLGYFFDDHVRFMDAFIEALGLEEVVLVIHDWGSALGFHWAKRNPERVKGIAFMEFIRPIPTWDEWPEFARETFQAFRTTDVGRKLIIDQNVFIEGTLPMGVVRPLTEVEMDHYREPFLNPVDREPLWRFPNELPIAGEPANIVALVGEYMDWLHQSPVPKLLFWGTPGVLIPPAEAARLAKSLPNCKAVDIGPGLNLLQEDNPDLIGSEIARWLSTLEISG

SEQ ID NO: 2391 - protein, 277 aa, Synthetic construct
MFHYVDVGPRDGTPVLFLHGNPTSSYVWRNIIPHVAPTHRCIAPDLIGMGKSDKPDLGYFFDDHVRFMDAFIEALGLEEVVLVIHDWGSALGFHWAKRNPERVKGIAFMEFIRPIPTWDEWPEFARETFQAFRTTDVGRKLIIDQNVFIEGTLPMGVVRPLTEVEMDHYREPFLNPVDREPLWRFPNELPIAGEPANIVALVREYMDWLHQSPVPKLLFWGTPGVLIPPAEAARLAKSLPNCKAVDIGPGLNLLQEDNPDLIGSEIARWLSTLEISG

SEQ ID NO: 2392 - protein, 277 aa, Synthetic construct
MFHYVDVGPRDGTPVLFLHGNPTSSYVWRNIIPHVAPTHRCIAPDLIGMGKSDKPDLGYFFDDHVRFMDAFIEALGLEEVVLVIHDWGSALGFHWAKRNPERVKGIAFMEFIRPIPTWDEWPEFARETFQAFRTTDVGRKLIIDQNVFIEGTLPMGVVRPLTEVEMDHYREPFLNPVDREPLWRFPNELPIAGEPANIVALVEAYMDWLHQSPVPKLLFWGTPGVLIPPAEAARLAKSLPNCKAVDIGPGLNLLQEDNPDLIGSEIARWLSTLEISG

SEQ ID NO: 2393 - protein, 277 aa, Synthetic construct
MFHYVDVGPRDGTPVLFLHGNPTSSYVWRNIIPHVAPTHRCIAPDLIGMGKSDKPDLGYFFDDHVRFMDAFIEALGLEEVVLVIHDWGSALGFHWAKRNPERVKGIAFMEFIRPIPTWDEWPEFARETFQAFRTTDVGRKLIIDQNVFIEGTLPMGVVRPLTEVEMDHYREPFLNPVDREPLWRFPNELPIAGEPANIVALVERYMDWLHQSPVPKLLFWGTPGVLIPPAEAARLAKSLPNCKAVDIGPGLNLLQEDNPDLIGSEIARWLSTLEISG

SEQ ID NO: 2394 - protein, 277 aa, Synthetic construct
MFHYVDVGPRDGTPVLFLHGNPTSSYVWRNIIPHVAPTHRCIAPDLIGMGKSDKPDLGYFFDDHVRFMDAFIEALGLEEVVLVIHDWGSALGFHWAKRNPERVKGIAFMEFIRPIPTWDEWPEFARETFQAFRTTDVGRKLIIDQNVFIEGTLPMGVVRPLTEVEMDHYREPFLNPVDREPLWRFPNELPIAGEPANIVALVESYMDWLHQSPVPKLLFWGTPGVLIPPAEAARLAKSLPNCKAVDIGPGLNLLQEDNPDLIGSEIARWLSTLEISG

SEQ ID NO: 2395 - protein, 277 aa, Synthetic construct
MFHYVDVGPRDGTPVLFLHGNPTSSYVWRNIIPHVAPTHRCIAPDLIGMGKSDKPDLGYFFDDHVRFMDAFIEALGLEEVVLVIHDWGSALGFHWAKRNPERVKGIAFMEFIRPIPTWDEWPEFARETFQAFRTTDVGRKLIIDQNVFIEGTLPMGVVRPLTEVEMDHYREPFLNPVDREPLWRFPNELPIAGEPANIVALVEGYMDWLHQSPVPKLLFWGTPGVLIPPAEAARLAKSLPNCKAVDIGPGLNLLQEDNPDLIGSEIARWLSTLEISG

SEQ ID NO: 2396 - protein, 277 aa, Synthetic construct
MFHYVDVGPRDGTPVLFLHGNPTSSYVWRNIIPHVAPTHRCIAPDLIGMGKSDKPDLGYFFDDHVRFMDAFIEALGLEEVVLVIHDWGSALGFHWAKRNPERVKGIAFMEFIRPIPTWDEWPEFARETFQAFRTTDVGRKLIIDQNVFIEGTLPMGVVRPLTEVEMDHYREPFLNPVDREPLWRFPNELPIAGEPANIVALVEDYMDWLHQSPVPKLLFWGTPGVLIPPAEAARLAKSLPNCKAVDIGPGLNLLQEDNPDLIGSEIARWLSTLEISG

SEQ ID NO: 2397 - protein, 277 aa, Synthetic construct
MFHYVDVGPRDGTPVLFLHGNPTSSYVWRNIIPHVAPTHRCIAPDLIGMGKSDKPDLGYFFDDHVRFMDAFIEALGLEEVVLVIHDWGSALGFHWAKRNPERVKGIAFMEFIRPIPTWDEWPEFARETFQAFRTTDVGRKLIIDQNVFIEGTLPMGVVRPLTEVEMDHYREPFLNPVDREPLWRFPNELPIAGEPANIVALVEQYMDWLHQSPVPKLLFWGTPGVLIPPAEAARLAKSLPNCKAVDIGPGLNLLQEDNPDLIGSEIARWLSTLEISG

SEQ ID NO: 2398 - protein, 277 aa, Synthetic construct
MFHYVDVGPRDGTPVLFLHGNPTSSYVWRNIIPHVAPTHRCIAPDLIGMGKSDKPDLGYFFDDHVRFMDAFIEALGLEEVVLVIHDWGSALGFHWAKRNPERVKGIAFMEFIRPIPTWDEWPEFARETFQAFRTTDVGRKLIIDQNVFIEGTLPMGVVRPLTEVEMDHYREPFLNPVDREPLWRFPNELPIAGEPANIVALVEENMDWLHQSPVPKLLFWGTPGVLIPPAEAARLAKSLPNCKAVDIGPGLNLLQEDNPDLIGSEIARWLSTLEISG

SEQ ID NO: 2399 - protein, 277 aa, Synthetic construct
MFHYVDVGPRDGTPVLFLHGNPTSSYVWRNIIPHVAPTHRCIAPDLIGMGKSDKPDLGYFFDDHVRFMDAFIEALGLEEVVLVIHDWGSALGFHWAKRNPERVKGIAFMEFIRPIPTWDEWPEFARETFQAFRTTDVGRKLIIDQNVFIEGTLPMGVVRPLTEVEMDHYREPFLNPVDREPLWRFPNELPIAGEPANIVALVEEHMDWLHQSPVPKLLFWGTPGVLIPPAEAARLAKSLPNCKAVDIGPGLNLLQEDNPDLIGSEIARWLSTLEISG

SEQ ID NO: 2400 - protein, 277 aa, Synthetic construct
MFHYVDVGPRDGTPVLFLHGNPTSSYVWRNIIPHVAPTHRCIAPDLIGMGKSDKPDLGYFFDDHVRFMDAFIEALGLEEVVLVIHDWGSALGFHWAKRNPERVKGIAFMEFIRPIPTWDEWPEFARETFQAFRTTDVGRKLIIDQNVFIEGTLPMGVVRPLTEVEMDHYREPFLNPVDREPLWRFPNELPIAGEPANIVALVEESMDWLHQSPVPKLLFWGTPGVLIPPAEAARLAKSLPNCKAVDIGPGLNLLQEDNPDLIGSEIARWLSTLEISG

SEQ ID NO: 2401 - protein, 277 aa, Synthetic construct
MFHYVDVGPRDGTPVLFLHGNPTSSYVWRNIIPHVAPTHRCIAPDLIGMGKSDKPDLGYFFDDHVRFMDAFIEALGLEEVVLVIHDWGSALGFHWAKRNPERVKGIAFMEFIRPIPTWDEWPEFARETFQAFRTTDVGRKLIIDQNVFIEGTLPMGVVRPLTEVEMDHYREPFLNPVDREPLWRFPNELPIAGEPANIVALVEEFMDWLHQSPVPKLLFWGTPGVLIPPAEAARLAKSLPNCKAVDIGPGLNLLQEDNPDLIGSEIARWLSTLEISG

SEQ ID NO: 2402 - protein, 277 aa, Synthetic construct
MFHYVDVGPRDGTPVLFLHGNPTSSYVWRNIIPHVAPTHRCIAPDLIGMGKSDKPDLGYFFDDHVRFMDAFIEALGLEEVVLVIHDWGSALGFHWAKRNPERVKGIAFMEFIRPIPTWDEWPEFARETFQAFRTTDVGRKLIIDQNVFIEGTLPMGVVRPLTEVEMDHYREPFLNPVDREPLWRFPNELPIAGEPANIVALVEETMDWLHQSPVPKLLFWGTPGVLIPPAEAARLAKSLPNCKAVDIGPGLNLLQEDNPDLIGSEIARWLSTLEISG

SEQ ID NO: 2403 - protein, 277 aa, Synthetic construct
MFHYVDVGPRDGTPVLFLHGNPTSSYVWRNIIPHVAPTHRCIAPDLIGMGKSDKPDLGYFFDDHVRFMDAFIEALGLEEVVLVIHDWGSALGFHWAKRNPERVKGIAFMEFIRPIPTWDEWPEFARETFQAFRTTDVGRKLIIDQNVFIEGTLPMGVVRPLTEVEMDHYREPFLNPVDREPLWRFPNELPIAGEPANIVALVEEAMDWLHQSPVPKLLFWGTPGVLIPPAEAARLAKSLPNCKAVDIGPGLNLLQEDNPDLIGSEIARWLSTLEISG

SEQ ID NO: 2404 - protein, 277 aa, Synthetic construct
MFHYVDVGPRDGTPVLFLHGNPTSSYVWRNIIPHVAPTHRCIAPDLIGMGKSDKPDLGYFFDDHVRFMDAFIEALGLEEVVLVIHDWGSALGFHWAKRNPERVKGIAFMEFIRPIPTWDEWPEFARETFQAFRTTDVGRKLIIDQNVFIEGTLPMGVVRPLTEVEMDHYREPFLNPVDREPLWRFPNELPIAGEPANIVALVEEYADWLHQSPVPKLLFWGTPGVLIPPAEAARLAKSLPNCKAVDIGPGLNLLQEDNPDLIGSEIARWLSTLEISG

SEQ ID NO: 2405 - protein, 277 aa, Synthetic construct
MFHYVDVGPRDGTPVLFLHGNPTSSYVWRNIIPHVAPTHRCIAPDLIGMGKSDKPDLGYFFDDHVRFMDAFIEALGLEEVVLVIHDWGSALGFHWAKRNPERVKGIAFMEFIRPIPTWDEWPEFARETFQAFRTTDVGRKLIIDQNVFIEGTLPMGVVRPLTEVEMDHYREPFLNPVDREPLWRFPNELPIAGEPANIVALVEEYGDWLHQSPVPKLLFWGTPGVLIPPAEAARLAKSLPNCKAVDIGPGLNLLQEDNPDLIGSEIARWLSTLEISG

SEQ ID NO: 2406 - protein, 277 aa, Synthetic construct
MFHYVDVGPRDGTPVLFLHGNPTSSYVWRNIIPHVAPTHRCIAPDLIGMGKSDKPDLGYFFDDHVRFMDAFIEALGLEEVVLVIHDWGSALGFHWAKRNPERVKGIAFMEFIRPIPTWDEWPEFARETFQAFRTTDVGRKLIIDQNVFIEGTLPMGVVRPLTEVEMDHYREPFLNPVDREPLWRFPNELPIAGEPANIVALVEEYSDWLHQSPVPKLLFWGTPGVLIPPAEAARLAKSLPNCKAVDIGPGLNLLQEDNPDLIGSEIARWLSTLEISG

SEQ ID NO: 2407 - protein, 277 aa, Synthetic construct
MFHYVDVGPRDGTPVLFLHGNPTSSYVWRNIIPHVAPTHRCIAPDLIGMGKSDKPDLGYFFDDHVRFMDAFIEALGLEEVVLVIHDWGSALGFHWAKRNPERVKGIAFMEFIRPIPTWDEWPEFARETFQAFRTTDVGRKLIIDQNVFIEGTLPMGVVRPLTEVEMDHYREPFLNPVDREPLWRFPNELPIAGEPANIVALVEEYDDWLHQSPVPKLLFWGTPGVLIPPAEAARLAKSLPNCKAVDIGPGLNLLQEDNPDLIGSEIARWLSTLEISG

SEQ ID NO: 2408 - protein, 277 aa, Synthetic construct
MFHYVDVGPRDGTPVLFLHGNPTSSYVWRNIIPHVAPTHRCIAPDLIGMGKSDKPDLGYFFDDHVRFMDAFIEALGLEEVVLVIHDWGSALGFHWAKRNPERVKGIAFMEFIRPIPTWDEWPEFARETFQAFRTTDVGRKLIIDQNVFIEGTLPMGVVRPLTEVEMDHYREPFLNPVDREPLWRFPNELPIAGEPANIVALVEEYEDWLHQSPVPKLLFWGTPGVLIPPAEAARLAKSLPNCKAVDIGPGLNLLQEDNPDLIGSEIARWLSTLEISG

SEQ ID NO: 2409 - protein, 277 aa, Synthetic construct
MFHYVDVGPRDGTPVLFLHGNPTSSYVWRNIIPHVAPTHRCIAPDLIGMGKSDKPDLGYFFDDHVRFMDAFIEALGLEEVVLVIHDWGSALGFHWAKRNPERVKGIAFMEFIRPIPTWDEWPEFARETFQAFRTTDVGRKLIIDQNVFIEGTLPMGVVRPLTEVEMDHYREPFLNPVDREPLWRFPNELPIAGEPANIVALVEEYRDWLHQSPVPKLLFWGTPGVLIPPAEAARLAKSLPNCKAVDIGPGLNLLQEDNPDLIGSEIARWLSTLEISG

SEQ ID NO: 2410 - protein, 277 aa, Synthetic construct
MFHYVDVGPRDGTPVLFLHGNPTSSYVWRNIIPHVAPTHRCIAPDLIGMGKSDKPDLGYFFDDHVRFMDAFIEALGLEEVVLVIHDWGSALGFHWAKRNPERVKGIAFMEFIRPIPTWDEWPEFARETFQAFRTTDVGRKLIIDQNVFIEGTLPMGVVRPLTEVEMDHYREPFLNPVDREPLWRFPNELPIAGEPANIVALVEEYMAWLHQSPVPKLLFWGTPGVLIPPAEAARLAKSLPNCKAVDIGPGLNLLQEDNPDLIGSEIARWLSTLEISG

SEQ ID NO: 2411 - protein, 277 aa, Synthetic construct
MFHYVDVGPRDGTPVLFLHGNPTSSYVWRNIIPHVAPTHRCIAPDLIGMGKSDKPDLGYFFDDHVRFMDAFIEALGLEEVVLVIHDWGSALGFHWAKRNPERVKGIAFMEFIRPIPTWDEWPEFARETFQAFRTTDVGRKLIIDQNVFIEGTLPMGVVRPLTEVEMDHYREPFLNPVDREPLWRFPNELPIAGEPANIVALVEEYMEWLHQSPVPKLLFWGTPGVLIPPAEAARLAKSLPNCKAVDIGPGLNLLQEDNPDLIGSEIARWLSTLEISG

SEQ ID NO: 2412 - protein, 277 aa, Synthetic construct
MFHYVDVGPRDGTPVLFLHGNPTSSYVWRNIIPHVAPTHRCIAPDLIGMGKSDKPDLGYFFDDHVRFMDAFIEALGLEEVVLVIHDWGSALGFHWAKRNPERVKGIAFMEFIRPIPTWDEWPEFARETFQAFRTTDVGRKLIIDQNVFIEGTLPMGVVRPLTEVEMDHYREPFLNPVDREPLWRFPNELPIAGEPANIVALVEEYMSWLHQSPVPKLLFWGTPGVLIPPAEAARLAKSLPNCKAVDIGPGLNLLQEDNPDLIGSEIARWLSTLEISG

SEQ ID NO: 2413 - protein, 277 aa, Synthetic construct
MFHYVDVGPRDGTPVLFLHGNPTSSYVWRNIIPHVAPTHRCIAPDLIGMGKSDKPDLGYFFDDHVRFMDAFIEALGLEEVVLVIHDWGSALGFHWAKRNPERVKGIAFMEFIRPIPTWDEWPEFARETFQAFRTTDVGRKLIIDQNVFIEGTLPMGVVRPLTEVEMDHYREPFLNPVDREPLWRFPNELPIAGEPANIVALVEEYMTWLHQSPVPKLLFWGTPGVLIPPAEAARLAKSLPNCKAVDIGPGLNLLQEDNPDLIGSEIARWLSTLEISG

SEQ ID NO: 2414 - protein, 277 aa, Synthetic construct
MFHYVDVGPRDGTPVLFLHGNPTSSYVWRNIIPHVAPTHRCIAPDLIGMGKSDKPDLGYFFDDHVRFMDAFIEALGLEEVVLVIHDWGSALGFHWAKRNPERVKGIAFMEFIRPIPTWDEWPEFARETFQAFRTTDVGRKLIIDQNVFIEGTLPMGVVRPLTEVEMDHYREPFLNPVDREPLWRFPNELPIAGEPANIVALVEEYMGWLHQSPVPKLLFWGTPGVLIPPAEAARLAKSLPNCKAVDIGPGLNLLQEDNPDLIGSEIARWLSTLEISG

SEQ ID NO: 2415 - protein, 277 aa, Synthetic construct
MFHYVDVGPRDGTPVLFLHGNPTSSYVWRNIIPHVAPTHRCIAPDLIGMGKSDKPDLGYFFDDHVRFMDAFIEALGLEEVVLVIHDWGSALGFHWAKRNPERVKGIAFMEFIRPIPTWDEWPEFARETFQAFRTTDVGRKLIIDQNVFIEGTLPMGVVRPLTEVEMDHYREPFLNPVDREPLWRFPNELPIAGEPANIVALVEEYMQWLHQSPVPKLLFWGTPGVLIPPAEAARLAKSLPNCKAVDIGPGLNLLQEDNPDLIGSEIARWLSTLEISG

SEQ ID NO: 2416 - protein, 277 aa, Synthetic construct
MFHYVDVGPRDGTPVLFLHGNPTSSYVWRNIIPHVAPTHRCIAPDLIGMGKSDKPDLGYFFDDHVRFMDAFIEALGLEEVVLVIHDWGSALGFHWAKRNPERVKGIAFMEFIRPIPTWDEWPEFARETFQAFRTTDVGRKLIIDQNVFIEGTLPMGVVRPLTEVEMDHYREPFLNPVDREPLWRFPNELPIAGEPANIVALVEEYMDFLHQSPVPKLLFWGTPGVLIPPAEAARLAKSLPNCKAVDIGPGLNLLQEDNPDLIGSEIARWLSTLEISG

SEQ ID NO: 2417 - protein, 277 aa, Synthetic construct
MFHYVDVGPRDGTPVLFLHGNPTSSYVWRNIIPHVAPTHRCIAPDLIGMGKSDKPDLGYFFDDHVRFMDAFIEALGLEEVVLVIHDWGSALGFHWAKRNPERVKGIAFMEFIRPIPTWDEWPEFARETFQAFRTTDVGRKLIIDQNVFIEGTLPMGVVRPLTEVEMDHYREPFLNPVDREPLWRFPNELPIAGEPANIVALVEEYMDYLHQSPVPKLLFWGTPGVLIPPAEAARLAKSLPNCKAVDIGPGLNLLQEDNPDLIGSEIARWLSTLEISG

SEQ ID NO: 2418 - protein, 277 aa, Synthetic construct
MFHYVDVGPRDGTPVLFLHGNPTSSYVWRNIIPHVAPTHRCIAPDLIGMGKSDKPDLGYFFDDHVRFMDAFIEALGLEEVVLVIHDWGSALGFHWAKRNPERVKGIAFMEFIRPIPTWDEWPEFARETFQAFRTTDVGRKLIIDQNVFIEGTLPMGVVRPLTEVEMDHYREPFLNPVDREPLWRFPNELPIAGEPANIVALVEEYMDLLHQSPVPKLLFWGTPGVLIPPAEAARLAKSLPNCKAVDIGPGLNLLQEDNPDLIGSEIARWLSTLEISG

SEQ ID NO: 2419 - protein, 277 aa, Synthetic construct
MFHYVDVGPRDGTPVLFLHGNPTSSYVWRNIIPHVAPTHRCIAPDLIGMGKSDKPDLGYFFDDHVRFMDAFIEALGLEEVVLVIHDWGSALGFHWAKRNPERVKGIAFMEFIRPIPTWDEWPEFARETFQAFRTTDVGRKLIIDQNVFIEGTLPMGVVRPLTEVEMDHYREPFLNPVDREPLWRFPNELPIAGEPANIVALVEEYMDHLHQSPVPKLLFWGTPGVLIPPAEAARLAKSLPNCKAVDIGPGLNLLQEDNPDLIGSEIARWLSTLEISG

SEQ ID NO: 2420 - protein, 277 aa, Synthetic construct
MFHYVDVGPRDGTPVLFLHGNPTSSYVWRNIIPHVAPTHRCIAPDLIGMGKSDKPDLGYFFDDHVRFMDAFIEALGLEEVVLVIHDWGSALGFHWAKRNPERVKGIAFMEFIRPIPTWDEWPEFARETFQAFRTTDVGRKLIIDQNVFIEGTLPMGVVRPLTEVEMDHYREPFLNPVDREPLWRFPNELPIAGEPANIVALVEEYMDRLHQSPVPKLLFWGTPGVLIPPAEAARLAKSLPNCKAVDIGPGLNLLQEDNPDLIGSEIARWLSTLEISG

SEQ ID NO: 2421 - protein, 277 aa, Synthetic construct
MFHYVDVGPRDGTPVLFLHGNPTSSYVWRNIIPHVAPTHRCIAPDLIGMGKSDKPDLGYFFDDHVRFMDAFIEALGLEEVVLVIHDWGSALGFHWAKRNPERVKGIAFMEFIRPIPTWDEWPEFARETFQAFRTTDVGRKLIIDQNVFIEGTLPMGVVRPLTEVEMDHYREPFLNPVDREPLWRFPNELPIAGEPANIVALVEEYMDALHQSPVPKLLFWGTPGVLIPPAEAARLAKSLPNCKAVDIGPGLNLLQEDNPDLIGSEIARWLSTLEISG

SEQ ID NO: 2422 - protein, 277 aa, Synthetic construct
MFHYVDVGPRDGTPVLFLHGNPTSSYVWRNIIPHVAPTHRCIAPDLIGMGKSDKPDLGYFFDDHVRFMDAFIEALGLEEVVLVIHDWGSALGFHWAKRNPERVKGIAFMEFIRPIPTWDEWPEFARETFQAFRTTDVGRKLIIDQNVFIEGTLPMGVVRPLTEVEMDHYREPFLNPVDREPLWRFPNELPIAGEPANIVALVEEYMDWMHQSPVPKLLFWGTPGVLIPPAEAARLAKSLPNCKAVDIGPGLNLLQEDNPDLIGSEIARWLSTLEISG

SEQ ID NO: 2423 - protein, 277 aa, Synthetic construct
MFHYVDVGPRDGTPVLFLHGNPTSSYVWRNIIPHVAPTHRCIAPDLIGMGKSDKPDLGYFFDDHVRFMDAFIEALGLEEVVLVIHDWGSALGFHWAKRNPERVKGIAFMEFIRPIPTWDEWPEFARETFQAFRTTDVGRKLIIDQNVFIEGTLPMGVVRPLTEVEMDHYREPFLNPVDREPLWRFPNELPIAGEPANIVALVEEYMDWIHQSPVPKLLFWGTPGVLIPPAEAARLAKSLPNCKAVDIGPGLNLLQEDNPDLIGSEIARWLSTLEISG

SEQ ID NO: 2424 - protein, 277 aa, Synthetic construct
MFHYVDVGPRDGTPVLFLHGNPTSSYVWRNIIPHVAPTHRCIAPDLIGMGKSDKPDLGYFFDDHVRFMDAFIEALGLEEVVLVIHDWGSALGFHWAKRNPERVKGIAFMEFIRPIPTWDEWPEFARETFQAFRTTDVGRKLIIDQNVFIEGTLPMGVVRPLTEVEMDHYREPFLNPVDREPLWRFPNELPIAGEPANIVALVEEYMDWFHQSPVPKLLFWGTPGVLIPPAEAARLAKSLPNCKAVDIGPGLNLLQEDNPDLIGSEIARWLSTLEISG

SEQ ID NO: 2425 - protein, 277 aa, Synthetic construct
MFHYVDVGPRDGTPVLFLHGNPTSSYVWRNIIPHVAPTHRCIAPDLIGMGKSDKPDLGYFFDDHVRFMDAFIEALGLEEVVLVIHDWGSALGFHWAKRNPERVKGIAFMEFIRPIPTWDEWPEFARETFQAFRTTDVGRKLIIDQNVFIEGTLPMGVVRPLTEVEMDHYREPFLNPVDREPLWRFPNELPIAGEPANIVALVEEYMDWVHQSPVPKLLFWGTPGVLIPPAEAARLAKSLPNCKAVDIGPGLNLLQEDNPDLIGSEIARWLSTLEISG

SEQ ID NO: 2426 - protein, 277 aa, Synthetic construct
MFHYVDVGPRDGTPVLFLHGNPTSSYVWRNIIPHVAPTHRCIAPDLIGMGKSDKPDLGYFFDDHVRFMDAFIEALGLEEVVLVIHDWGSALGFHWAKRNPERVKGIAFMEFIRPIPTWDEWPEFARETFQAFRTTDVGRKLIIDQNVFIEGTLPMGVVRPLTEVEMDHYREPFLNPVDREPLWRFPNELPIAGEPANIVALVEEYMDWAHQSPVPKLLFWGTPGVLIPPAEAARLAKSLPNCKAVDIGPGLNLLQEDNPDLIGSEIARWLSTLEISG

SEQ ID NO: 2427 - protein, 277 aa, Synthetic construct
MFHYVDVGPRDGTPVLFLHGNPTSSYVWRNIIPHVAPTHRCIAPDLIGMGKSDKPDLGYFFDDHVRFMDAFIEALGLEEVVLVIHDWGSALGFHWAKRNPERVKGIAFMEFIRPIPTWDEWPEFARETFQAFRTTDVGRKLIIDQNVFIEGTLPMGVVRPLTEVEMDHYREPFLNPVDREPLWRFPNELPIAGEPANIVALVEEYMDWTHQSPVPKLLFWGTPGVLIPPAEAARLAKSLPNCKAVDIGPGLNLLQEDNPDLIGSEIARWLSTLEISG

SEQ ID NO: 2428 - protein, 277 aa, Synthetic construct
MFHYVDVGPRDGTPVLFLHGNPTSSYVWRNIIPHVAPTHRCIAPDLIGMGKSDKPDLGYFFDDHVRFMDAFIEALGLEEVVLVIHDWGSALGFHWAKRNPERVKGIAFMEFIRPIPTWDEWPEFARETFQAFRTTDVGRKLIIDQNVFIEGTLPMGVVRPLTEVEMDHYREPFLNPVDREPLWRFPNELPIAGEPANIVALVEEYMDWLAQSPVPKLLFWGTPGVLIPPAEAARLAKSLPNCKAVDIGPGLNLLQEDNPDLIGSEIARWLSTLEISG

SEQ ID NO: 2429 - protein, 277 aa, Synthetic construct
MFHYVDVGPRDGTPVLFLHGNPTSSYVWRNIIPHVAPTHRCIAPDLIGMGKSDKPDLGYFFDDHVRFMDAFIEALGLEEVVLVIHDWGSALGFHWAKRNPERVKGIAFMEFIRPIPTWDEWPEFARETFQAFRTTDVGRKLIIDQNVFIEGTLPMGVVRPLTEVEMDHYREPFLNPVDREPLWRFPNELPIAGEPANIVALVEEYMDWLSQSPVPKLLFWGTPGVLIPPAEAARLAKSLPNCKAVDIGPGLNLLQEDNPDLIGSEIARWLSTLEISG

SEQ ID NO: 2430 - protein, 277 aa, Synthetic construct
MFHYVDVGPRDGTPVLFLHGNPTSSYVWRNIIPHVAPTHRCIAPDLIGMGKSDKPDLGYFFDDHVRFMDAFIEALGLEEVVLVIHDWGSALGFHWAKRNPERVKGIAFMEFIRPIPTWDEWPEFARETFQAFRTTDVGRKLIIDQNVFIEGTLPMGVVRPLTEVEMDHYREPFLNPVDREPLWRFPNELPIAGEPANIVALVEEYMDWLRQSPVPKLLFWGTPGVLIPPAEAARLAKSLPNCKAVDIGPGLNLLQEDNPDLIGSEIARWLSTLEISG

SEQ ID NO: 2431 - protein, 277 aa, Synthetic construct
MFHYVDVGPRDGTPVLFLHGNPTSSYVWRNIIPHVAPTHRCIAPDLIGMGKSDKPDLGYFFDDHVRFMDAFIEALGLEEVVLVIHDWGSALGFHWAKRNPERVKGIAFMEFIRPIPTWDEWPEFARETFQAFRTTDVGRKLIIDQNVFIEGTLPMGVVRPLTEVEMDHYREPFLNPVDREPLWRFPNELPIAGEPANIVALVEEYMDWLGQSPVPKLLFWGTPGVLIPPAEAARLAKSLPNCKAVDIGPGLNLLQEDNPDLIGSEIARWLSTLEISG

SEQ ID NO: 2432 - protein, 277 aa, Synthetic construct
MFHYVDVGPRDGTPVLFLHGNPTSSYVWRNIIPHVAPTHRCIAPDLIGMGKSDKPDLGYFFDDHVRFMDAFIEALGLEEVVLVIHDWGSALGFHWAKRNPERVKGIAFMEFIRPIPTWDEWPEFARETFQAFRTTDVGRKLIIDQNVFIEGTLPMGVVRPLTEVEMDHYREPFLNPVDREPLWRFPNELPIAGEPANIVALVEEYMDWLEQSPVPKLLFWGTPGVLIPPAEAARLAKSLPNCKAVDIGPGLNLLQEDNPDLIGSEIARWLSTLEISG

SEQ ID NO: 2433 - protein, 277 aa, Synthetic construct
MFHYVDVGPRDGTPVLFLHGNPTSSYVWRNIIPHVAPTHRCIAPDLIGMGKSDKPDLGYFFDDHVRFMDAFIEALGLEEVVLVIHDWGSALGFHWAKRNPERVKGIAFMEFIRPIPTWDEWPEFARETFQAFRTTDVGRKLIIDQNVFIEGTLPMGVVRPLTEVEMDHYREPFLNPVDREPLWRFPNELPIAGEPANIVALVEEYMDWLKQSPVPKLLFWGTPGVLIPPAEAARLAKSLPNCKAVDIGPGLNLLQEDNPDLIGSEIARWLSTLEISG

SEQ ID NO: 2434 - protein, 277 aa, Synthetic construct
MFHYVDVGPRDGTPVLFLHGNPTSSYVWRNIIPHVAPTHRCIAPDLIGMGKSDKPDLGYFFDDHVRFMDAFIEALGLEEVVLVIHDWGSALGFHWAKRNPERVKGIAFMEFIRPIPTWDEWPEFARETFQAFRTTDVGRKLIIDQNVFIEGTLPMGVVRPLTEVEMDHYREPFLNPVDREPLWRFPNELPIAGEPANIVALVEEYMDWLHTSPVPKLLFWGTPGVLIPPAEAARLAKSLPNCKAVDIGPGLNLLQEDNPDLIGSEIARWLSTLEISG

SEQ ID NO: 2435 - protein, 277 aa, Synthetic construct
MFHYVDVGPRDGTPVLFLHGNPTSSYVWRNIIPHVAPTHRCIAPDLIGMGKSDKPDLGYFFDDHVRFMDAFIEALGLEEVVLVIHDWGSALGFHWAKRNPERVKGIAFMEFIRPIPTWDEWPEFARETFQAFRTTDVGRKLIIDQNVFIEGTLPMGVVRPLTEVEMDHYREPFLNPVDREPLWRFPNELPIAGEPANIVALVEEYMDWLHASPVPKLLFWGTPGVLIPPAEAARLAKSLPNCKAVDIGPGLNLLQEDNPDLIGSEIARWLSTLEISG

SEQ ID NO: 2436 - protein, 277 aa, Synthetic construct
MFHYVDVGPRDGTPVLFLHGNPTSSYVWRNIIPHVAPTHRCIAPDLIGMGKSDKPDLGYFFDDHVRFMDAFIEALGLEEVVLVIHDWGSALGFHWAKRNPERVKGIAFMEFIRPIPTWDEWPEFARETFQAFRTTDVGRKLIIDQNVFIEGTLPMGVVRPLTEVEMDHYREPFLNPVDREPLWRFPNELPIAGEPANIVALVEEYMDWLHSSPVPKLLFWGTPGVLIPPAEAARLAKSLPNCKAVDIGPGLNLLQEDNPDLIGSEIARWLSTLEISG

SEQ ID NO: 2437 - protein, 277 aa, Synthetic construct
MFHYVDVGPRDGTPVLFLHGNPTSSYVWRNIIPHVAPTHRCIAPDLIGMGKSDKPDLGYFFDDHVRFMDAFIEALGLEEVVLVIHDWGSALGFHWAKRNPERVKGIAFMEFIRPIPTWDEWPEFARETFQAFRTTDVGRKLIIDQNVFIEGTLPMGVVRPLTEVEMDHYREPFLNPVDREPLWRFPNELPIAGEPANIVALVEEYMDWLHRSPVPKLLFWGTPGVLIPPAEAARLAKSLPNCKAVDIGPGLNLLQEDNPDLIGSEIARWLSTLEISG

SEQ ID NO: 2438 - protein, 277 aa, Synthetic construct
MFHYVDVGPRDGTPVLFLHGNPTSSYVWRNIIPHVAPTHRCIAPDLIGMGKSDKPDLGYFFDDHVRFMDAFIEALGLEEVVLVIHDWGSALGFHWAKRNPERVKGIAFMEFIRPIPTWDEWPEFARETFQAFRTTDVGRKLIIDQNVFIEGTLPMGVVRPLTEVEMDHYREPFLNPVDREPLWRFPNELPIAGEPANIVALVEEYMDWLHESPVPKLLFWGTPGVLIPPAEAARLAKSLPNCKAVDIGPGLNLLQEDNPDLIGSEIARWLSTLEISG

SEQ ID NO: 2439 - protein, 277 aa, Synthetic construct
MFHYVDVGPRDGTPVLFLHGNPTSSYVWRNIIPHVAPTHRCIAPDLIGMGKSDKPDLGYFFDDHVRFMDAFIEALGLEEVVLVIHDWGSALGFHWAKRNPERVKGIAFMEFIRPIPTWDEWPEFARETFQAFRTTDVGRKLIIDQNVFIEGTLPMGVVRPLTEVEMDHYREPFLNPVDREPLWRFPNELPIAGEPANIVALVEEYMDWLHKSPVPKLLFWGTPGVLIPPAEAARLAKSLPNCKAVDIGPGLNLLQEDNPDLIGSEIARWLSTLEISG

SEQ ID NO: 2440 - protein, 277 aa, Synthetic construct
MFHYVDVGPRDGTPVLFLHGNPTSSYVWRNIIPHVAPTHRCIAPDLIGMGKSDKPDLGYFFDDHVRFMDAFIEALGLEEVVLVIHDWGSALGFHWAKRNPERVKGIAFMEFIRPIPTWDEWPEFARETFQAFRTTDVGRKLIIDQNVFIEGTLPMGVVRPLTEVEMDHYREPFLNPVDREPLWRFPNELPIAGEPANIVALVEEYMDWLHQTPVPKLLFWGTPGVLIPPAEAARLAKSLPNCKAVDIGPGLNLLQEDNPDLIGSEIARWLSTLEISG

SEQ ID NO: 2441 - protein, 277 aa, Synthetic construct
MFHYVDVGPRDGTPVLFLHGNPTSSYVWRNIIPHVAPTHRCIAPDLIGMGKSDKPDLGYFFDDHVRFMDAFIEALGLEEVVLVIHDWGSALGFHWAKRNPERVKGIAFMEFIRPIPTWDEWPEFARETFQAFRTTDVGRKLIIDQNVFIEGTLPMGVVRPLTEVEMDHYREPFLNPVDREPLWRFPNELPIAGEPANIVALVEEYMDWLHQNPVPKLLFWGTPGVLIPPAEAARLAKSLPNCKAVDIGPGLNLLQEDNPDLIGSEIARWLSTLEISG

SEQ ID NO: 2442 - protein, 277 aa, Synthetic construct
MFHYVDVGPRDGTPVLFLHGNPTSSYVWRNIIPHVAPTHRCIAPDLIGMGKSDKPDLGYFFDDHVRFMDAFIEALGLEEVVLVIHDWGSALGFHWAKRNPERVKGIAFMEFIRPIPTWDEWPEFARETFQAFRTTDVGRKLIIDQNVFIEGTLPMGVVRPLTEVEMDHYREPFLNPVDREPLWRFPNELPIAGEPANIVALVEEYMDWLHQAPVPKLLFWGTPGVLIPPAEAARLAKSLPNCKAVDIGPGLNLLQEDNPDLIGSEIARWLSTLEISG

SEQ ID NO: 2443 - protein, 277 aa, Synthetic construct
MFHYVDVGPRDGTPVLFLHGNPTSSYVWRNIIPHVAPTHRCIAPDLIGMGKSDKPDLGYFFDDHVRFMDAFIEALGLEEVVLVIHDWGSALGFHWAKRNPERVKGIAFMEFIRPIPTWDEWPEFARETFQAFRTTDVGRKLIIDQNVFIEGTLPMGVVRPLTEVEMDHYREPFLNPVDREPLWRFPNELPIAGEPANIVALVEEYMDWLHQCPVPKLLFWGTPGVLIPPAEAARLAKSLPNCKAVDIGPGLNLLQEDNPDLIGSEIARWLSTLEISG

SEQ ID NO: 2444 - protein, 277 aa, Synthetic construct
MFHYVDVGPRDGTPVLFLHGNPTSSYVWRNIIPHVAPTHRCIAPDLIGMGKSDKPDLGYFFDDHVRFMDAFIEALGLEEVVLVIHDWGSALGFHWAKRNPERVKGIAFMEFIRPIPTWDEWPEFARETFQAFRTTDVGRKLIIDQNVFIEGTLPMGVVRPLTEVEMDHYREPFLNPVDREPLWRFPNELPIAGEPANIVALVEEYMDWLHQHPVPKLLFWGTPGVLIPPAEAARLAKSLPNCKAVDIGPGLNLLQEDNPDLIGSEIARWLSTLEISG

SEQ ID NO: 2445 - protein, 277 aa, Synthetic construct
MFHYVDVGPRDGTPVLFLHGNPTSSYVWRNIIPHVAPTHRCIAPDLIGMGKSDKPDLGYFFDDHVRFMDAFIEALGLEEVVLVIHDWGSALGFHWAKRNPERVKGIAFMEFIRPIPTWDEWPEFARETFQAFRTTDVGRKLIIDQNVFIEGTLPMGVVRPLTEVEMDHYREPFLNPVDREPLWRFPNELPIAGEPANIVALVEEYMDWLHQQPVPKLLFWGTPGVLIPPAEAARLAKSLPNCKAVDIGPGLNLLQEDNPDLIGSEIARWLSTLEISG

SEQ ID NO: 2446 - protein, 277 aa, Synthetic construct
MFHYVDVGPRDGTPVLFLHGNPTSSYVWRNIIPHVAPTHRCIAPDLIGMGKSDKPDLGYFFDDHVRFMDAFIEALGLEEVVLVIHDWGSALGFHWAKRNPERVKGIAFMEFIRPIPTWDEWPEFARETFQAFRTTDVGRKLIIDQNVFIEGTLPMGVVRPLTEVEMDHYREPFLNPVDREPLWRFPNELPIAGEPANIVALVEEYMDWLHQSDVPKLLFWGTPGVLIPPAEAARLAKSLPNCKAVDIGPGLNLLQEDNPDLIGSEIARWLSTLEISG

SEQ ID NO: 2447 - protein, 277 aa, Synthetic construct
MFHYVDVGPRDGTPVLFLHGNPTSSYVWRNIIPHVAPTHRCIAPDLIGMGKSDKPDLGYFFDDHVRFMDAFIEALGLEEVVLVIHDWGSALGFHWAKRNPERVKGIAFMEFIRPIPTWDEWPEFARETFQAFRTTDVGRKLIIDQNVFIEGTLPMGVVRPLTEVEMDHYREPFLNPVDREPLWRFPNELPIAGEPANIVALVEEYMDWLHQSEVPKLLFWGTPGVLIPPAEAARLAKSLPNCKAVDIGPGLNLLQEDNPDLIGSEIARWLSTLEISG

SEQ ID NO: 2448 - protein, 277 aa, Synthetic construct
MFHYVDVGPRDGTPVLFLHGNPTSSYVWRNIIPHVAPTHRCIAPDLIGMGKSDKPDLGYFFDDHVRFMDAFIEALGLEEVVLVIHDWGSALGFHWAKRNPERVKGIAFMEFIRPIPTWDEWPEFARETFQAFRTTDVGRKLIIDQNVFIEGTLPMGVVRPLTEVEMDHYREPFLNPVDREPLWRFPNELPIAGEPANIVALVEEYMDWLHQSTVPKLLFWGTPGVLIPPAEAARLAKSLPNCKAVDIGPGLNLLQEDNPDLIGSEIARWLSTLEISG

SEQ ID NO: 2449 - protein, 277 aa, Synthetic construct
MFHYVDVGPRDGTPVLFLHGNPTSSYVWRNIIPHVAPTHRCIAPDLIGMGKSDKPDLGYFFDDHVRFMDAFIEALGLEEVVLVIHDWGSALGFHWAKRNPERVKGIAFMEFIRPIPTWDEWPEFARETFQAFRTTDVGRKLIIDQNVFIEGTLPMGVVRPLTEVEMDHYREPFLNPVDREPLWRFPNELPIAGEPANIVALVEEYMDWLHQSSVPKLLFWGTPGVLIPPAEAARLAKSLPNCKAVDIGPGLNLLQEDNPDLIGSEIARWLSTLEISG

SEQ ID NO: 2450 - protein, 277 aa, Synthetic construct
MFHYVDVGPRDGTPVLFLHGNPTSSYVWRNIIPHVAPTHRCIAPDLIGMGKSDKPDLGYFFDDHVRFMDAFIEALGLEEVVLVIHDWGSALGFHWAKRNPERVKGIAFMEFIRPIPTWDEWPEFARETFQAFRTTDVGRKLIIDQNVFIEGTLPMGVVRPLTEVEMDHYREPFLNPVDREPLWRFPNELPIAGEPANIVALVEEYMDWLHQSQVPKLLFWGTPGVLIPPAEAARLAKSLPNCKAVDIGPGLNLLQEDNPDLIGSEIARWLSTLEISG

SEQ ID NO: 2451 - protein, 277 aa, Synthetic construct
MFHYVDVGPRDGTPVLFLHGNPTSSYVWRNIIPHVAPTHRCIAPDLIGMGKSDKPDLGYFFDDHVRFMDAFIEALGLEEVVLVIHDWGSALGFHWAKRNPERVKGIAFMEFIRPIPTWDEWPEFARETFQAFRTTDVGRKLIIDQNVFIEGTLPMGVVRPLTEVEMDHYREPFLNPVDREPLWRFPNELPIAGEPANIVALVEEYMDWLHQSAVPKLLFWGTPGVLIPPAEAARLAKSLPNCKAVDIGPGLNLLQEDNPDLIGSEIARWLSTLEISG

SEQ ID NO: 2452 - protein, 277 aa, Synthetic construct
MFHYVDVGPRDGTPVLFLHGNPTSSYVWRNIIPHVAPTHRCIAPDLIGMGKSDKPDLGYFFDDHVRFMDAFIEALGLEEVVLVIHDWGSALGFHWAKRNPERVKGIAFMEFIRPIPTWDEWPEFARETFQAFRTTDVGRKLIIDQNVFIEGTLPMGVVRPLTEVEMDHYREPFLNPVDREPLWRFPNELPIAGEPANIVALVEEYMDWLHQSPLPKLLFWGTPGVLIPPAEAARLAKSLPNCKAVDIGPGLNLLQEDNPDLIGSEIARWLSTLEISG

SEQ ID NO: 2453 - protein, 277 aa, Synthetic construct
MFHYVDVGPRDGTPVLFLHGNPTSSYVWRNIIPHVAPTHRCIAPDLIGMGKSDKPDLGYFFDDHVRFMDAFIEALGLEEVVLVIHDWGSALGFHWAKRNPERVKGIAFMEFIRPIPTWDEWPEFARETFQAFRTTDVGRKLIIDQNVFIEGTLPMGVVRPLTEVEMDHYREPFLNPVDREPLWRFPNELPIAGEPANIVALVEEYMDWLHQSPIPKLLFWGTPGVLIPPAEAARLAKSLPNCKAVDIGPGLNLLQEDNPDLIGSEIARWLSTLEISG

SEQ ID NO: 2454 - protein, 277 aa, Synthetic construct
MFHYVDVGPRDGTPVLFLHGNPTSSYVWRNIIPHVAPTHRCIAPDLIGMGKSDKPDLGYFFDDHVRFMDAFIEALGLEEVVLVIHDWGSALGFHWAKRNPERVKGIAFMEFIRPIPTWDEWPEFARETFQAFRTTDVGRKLIIDQNVFIEGTLPMGVVRPLTEVEMDHYREPFLNPVDREPLWRFPNELPIAGEPANIVALVEEYMDWLHQSPFPKLLFWGTPGVLIPPAEAARLAKSLPNCKAVDIGPGLNLLQEDNPDLIGSEIARWLSTLEISG

SEQ ID NO: 2455 - protein, 277 aa, Synthetic construct
MFHYVDVGPRDGTPVLFLHGNPTSSYVWRNIIPHVAPTHRCIAPDLIGMGKSDKPDLGYFFDDHVRFMDAFIEALGLEEVVLVIHDWGSALGFHWAKRNPERVKGIAFMEFIRPIPTWDEWPEFARETFQAFRTTDVGRKLIIDQNVFIEGTLPMGVVRPLTEVEMDHYREPFLNPVDREPLWRFPNELPIAGEPANIVALVEEYMDWLHQSPHPKLLFWGTPGVLIPPAEAARLAKSLPNCKAVDIGPGLNLLQEDNPDLIGSEIARWLSTLEISG

SEQ ID NO: 2456 - protein, 277 aa, Synthetic construct
MFHYVDVGPRDGTPVLFLHGNPTSSYVWRNIIPHVAPTHRCIAPDLIGMGKSDKPDLGYFFDDHVRFMDAFIEALGLEEVVLVIHDWGSALGFHWAKRNPERVKGIAFMEFIRPIPTWDEWPEFARETFQAFRTTDVGRKLIIDQNVFIEGTLPMGVVRPLTEVEMDHYREPFLNPVDREPLWRFPNELPIAGEPANIVALVEEYMDWLHQSPAPKLLFWGTPGVLIPPAEAARLAKSLPNCKAVDIGPGLNLLQEDNPDLIGSEIARWLSTLEISG

SEQ ID NO: 2457 - protein, 277 aa, Synthetic construct
MFHYVDVGPRDGTPVLFLHGNPTSSYVWRNIIPHVAPTHRCIAPDLIGMGKSDKPDLGYFFDDHVRFMDAFIEALGLEEVVLVIHDWGSALGFHWAKRNPERVKGIAFMEFIRPIPTWDEWPEFARETFQAFRTTDVGRKLIIDQNVFIEGTLPMGVVRPLTEVEMDHYREPFLNPVDREPLWRFPNELPIAGEPANIVALVEEYMDWLHQSPTPKLLFWGTPGVLIPPAEAARLAKSLPNCKAVDIGPGLNLLQEDNPDLIGSEIARWLSTLEISG

SEQ ID NO: 2458 - protein, 277 aa, Synthetic construct
MFHYVDVGPRDGTPVLFLHGNPTSSYVWRNIIPHVAPTHRCIAPDLIGMGKSDKPDLGYFFDDHVRFMDAFIEALGLEEVVLVIHDWGSALGFHWAKRNPERVKGIAFMEFIRPIPTWDEWPEFARETFQAFRTTDVGRKLIIDQNVFIEGTLPMGVVRPLTEVEMDHYREPFLNPVDREPLWRFPNELPIAGEPANIVALVEEYMDWLHQSPVAKLLFWGTPGVLIPPAEAARLAKSLPNCKAVDIGPGLNLLQEDNPDLIGSEIARWLSTLEISG

SEQ ID NO: 2459 - protein, 277 aa, Synthetic construct
MFHYVDVGPRDGTPVLFLHGNPTSSYVWRNIIPHVAPTHRCIAPDLIGMGKSDKPDLGYFFDDHVRFMDAFIEALGLEEVVLVIHDWGSALGFHWAKRNPERVKGIAFMEFIRPIPTWDEWPEFARETFQAFRTTDVGRKLIIDQNVFIEGTLPMGVVRPLTEVEMDHYREPFLNPVDREPLWRFPNELPIAGEPANIVALVEEYMDWLHQSPVEKLLFWGTPGVLIPPAEAARLAKSLPNCKAVDIGPGLNLLQEDNPDLIGSEIARWLSTLEISG

SEQ ID NO: 2460 - protein, 277 aa, Synthetic construct
MFHYVDVGPRDGTPVLFLHGNPTSSYVWRNIIPHVAPTHRCIAPDLIGMGKSDKPDLGYFFDDHVRFMDAFIEALGLEEVVLVIHDWGSALGFHWAKRNPERVKGIAFMEFIRPIPTWDEWPEFARETFQAFRTTDVGRKLIIDQNVFIEGTLPMGVVRPLTEVEMDHYREPFLNPVDREPLWRFPNELPIAGEPANIVALVEEYMDWLHQSPVSKLLFWGTPGVLIPPAEAARLAKSLPNCKAVDIGPGLNLLQEDNPDLIGSEIARWLSTLEISG

SEQ ID NO: 2461 - protein, 277 aa, Synthetic construct
MFHYVDVGPRDGTPVLFLHGNPTSSYVWRNIIPHVAPTHRCIAPDLIGMGKSDKPDLGYFFDDHVRFMDAFIEALGLEEVVLVIHDWGSALGFHWAKRNPERVKGIAFMEFIRPIPTWDEWPEFARETFQAFRTTDVGRKLIIDQNVFIEGTLPMGVVRPLTEVEMDHYREPFLNPVDREPLWRFPNELPIAGEPANIVALVEEYMDWLHQSPVDKLLFWGTPGVLIPPAEAARLAKSLPNCKAVDIGPGLNLLQEDNPDLIGSEIARWLSTLEISG

SEQ ID NO: 2462 - protein, 277 aa, Synthetic construct
MFHYVDVGPRDGTPVLFLHGNPTSSYVWRNIIPHVAPTHRCIAPDLIGMGKSDKPDLGYFFDDHVRFMDAFIEALGLEEVVLVIHDWGSALGFHWAKRNPERVKGIAFMEFIRPIPTWDEWPEFARETFQAFRTTDVGRKLIIDQNVFIEGTLPMGVVRPLTEVEMDHYREPFLNPVDREPLWRFPNELPIAGEPANIVALVEEYMDWLHQSPVQKLLFWGTPGVLIPPAEAARLAKSLPNCKAVDIGPGLNLLQEDNPDLIGSEIARWLSTLEISG

SEQ ID NO: 2463 - protein, 277 aa, Synthetic construct
MFHYVDVGPRDGTPVLFLHGNPTSSYVWRNIIPHVAPTHRCIAPDLIGMGKSDKPDLGYFFDDHVRFMDAFIEALGLEEVVLVIHDWGSALGFHWAKRNPERVKGIAFMEFIRPIPTWDEWPEFARETFQAFRTTDVGRKLIIDQNVFIEGTLPMGVVRPLTEVEMDHYREPFLNPVDREPLWRFPNELPIAGEPANIVALVEEYMDWLHQSPVRKLLFWGTPGVLIPPAEAARLAKSLPNCKAVDIGPGLNLLQEDNPDLIGSEIARWLSTLEISG

SEQ ID NO: 2464 - protein, 277 aa, Synthetic construct
MFHYVDVGPRDGTPVLFLHGNPTSSYVWRNIIPHVAPTHRCIAPDLIGMGKSDKPDLGYFFDDHVRFMDAFIEALGLEEVVLVIHDWGSALGFHWAKRNPERVKGIAFMEFIRPIPTWDEWPEFARETFQAFRTTDVGRKLIIDQNVFIEGTLPMGVVRPLTEVEMDHYREPFLNPVDREPLWRFPNELPIAGEPANIVALVEEYMDWLHQSPVPRLLFWGTPGVLIPPAEAARLAKSLPNCKAVDIGPGLNLLQEDNPDLIGSEIARWLSTLEISG

SEQ ID NO: 2465 - protein, 277 aa, Synthetic construct
MFHYVDVGPRDGTPVLFLHGNPTSSYVWRNIIPHVAPTHRCIAPDLIGMGKSDKPDLGYFFDDHVRFMDAFIEALGLEEVVLVIHDWGSALGFHWAKRNPERVKGIAFMEFIRPIPTWDEWPEFARETFQAFRTTDVGRKLIIDQNVFIEGTLPMGVVRPLTEVEMDHYREPFLNPVDREPLWRFPNELPIAGEPANIVALVEEYMDWLHQSPVPTLLFWGTPGVLIPPAEAARLAKSLPNCKAVDIGPGLNLLQEDNPDLIGSEIARWLSTLEISG

SEQ ID NO: 2466 - protein, 277 aa, Synthetic construct
MFHYVDVGPRDGTPVLFLHGNPTSSYVWRNIIPHVAPTHRCIAPDLIGMGKSDKPDLGYFFDDHVRFMDAFIEALGLEEVVLVIHDWGSALGFHWAKRNPERVKGIAFMEFIRPIPTWDEWPEFARETFQAFRTTDVGRKLIIDQNVFIEGTLPMGVVRPLTEVEMDHYREPFLNPVDREPLWRFPNELPIAGEPANIVALVEEYMDWLHQSPVPALLFWGTPGVLIPPAEAARLAKSLPNCKAVDIGPGLNLLQEDNPDLIGSEIARWLSTLEISG

SEQ ID NO: 2467 - protein, 277 aa, Synthetic construct
MFHYVDVGPRDGTPVLFLHGNPTSSYVWRNIIPHVAPTHRCIAPDLIGMGKSDKPDLGYFFDDHVRFMDAFIEALGLEEVVLVIHDWGSALGFHWAKRNPERVKGIAFMEFIRPIPTWDEWPEFARETFQAFRTTDVGRKLIIDQNVFIEGTLPMGVVRPLTEVEMDHYREPFLNPVDREPLWRFPNELPIAGEPANIVALVEEYMDWLHQSPVPQLLFWGTPGVLIPPAEAARLAKSLPNCKAVDIGPGLNLLQEDNPDLIGSEIARWLSTLEISG

SEQ ID NO: 2468 - protein, 277 aa, Synthetic construct
MFHYVDVGPRDGTPVLFLHGNPTSSYVWRNIIPHVAPTHRCIAPDLIGMGKSDKPDLGYFFDDHVRFMDAFIEALGLEEVVLVIHDWGSALGFHWAKRNPERVKGIAFMEFIRPIPTWDEWPEFARETFQAFRTTDVGRKLIIDQNVFIEGTLPMGVVRPLTEVEMDHYREPFLNPVDREPLWRFPNELPIAGEPANIVALVEEYMDWLHQSPVPMLLFWGTPGVLIPPAEAARLAKSLPNCKAVDIGPGLNLLQEDNPDLIGSEIARWLSTLEISG

SEQ ID NO: 2469 - protein, 277 aa, Synthetic construct
MFHYVDVGPRDGTPVLFLHGNPTSSYVWRNIIPHVAPTHRCIAPDLIGMGKSDKPDLGYFFDDHVRFMDAFIEALGLEEVVLVIHDWGSALGFHWAKRNPERVKGIAFMEFIRPIPTWDEWPEFARETFQAFRTTDVGRKLIIDQNVFIEGTLPMGVVRPLTEVEMDHYREPFLNPVDREPLWRFPNELPIAGEPANIVALVEEYMDWLHQSPVPSLLFWGTPGVLIPPAEAARLAKSLPNCKAVDIGPGLNLLQEDNPDLIGSEIARWLSTLEISG

SEQ ID NO: 2470 - protein, 277 aa, Synthetic construct
MFHYVDVGPRDGTPVLFLHGNPTSSYVWRNIIPHVAPTHRCIAPDLIGMGKSDKPDLGYFFDDHVRFMDAFIEALGLEEVVLVIHDWGSALGFHWAKRNPERVKGIAFMEFIRPIPTWDEWPEFARETFQAFRTTDVGRKLIIDQNVFIEGTLPMGVVRPLTEVEMDHYREPFLNPVDREPLWRFPNELPIAGEPANIVALVEEYMDWLHQSPVPKMLFWGTPGVLIPPAEAARLAKSLPNCKAVDIGPGLNLLQEDNPDLIGSEIARWLSTLEISG

SEQ ID NO: 2471 - protein, 277 aa, Synthetic construct
MFHYVDVGPRDGTPVLFLHGNPTSSYVWRNIIPHVAPTHRCIAPDLIGMGKSDKPDLGYFFDDHVRFMDAFIEALGLEEVVLVIHDWGSALGFHWAKRNPERVKGIAFMEFIRPIPTWDEWPEFARETFQAFRTTDVGRKLIIDQNVFIEGTLPMGVVRPLTEVEMDHYREPFLNPVDREPLWRFPNELPIAGEPANIVALVEEYMDWLHQSPVPKILFWGTPGVLIPPAEAARLAKSLPNCKAVDIGPGLNLLQEDNPDLIGSEIARWLSTLEISG

SEQ ID NO: 2472 - protein, 277 aa, Synthetic construct
MFHYVDVGPRDGTPVLFLHGNPTSSYVWRNIIPHVAPTHRCIAPDLIGMGKSDKPDLGYFFDDHVRFMDAFIEALGLEEVVLVIHDWGSALGFHWAKRNPERVKGIAFMEFIRPIPTWDEWPEFARETFQAFRTTDVGRKLIIDQNVFIEGTLPMGVVRPLTEVEMDHYREPFLNPVDREPLWRFPNELPIAGEPANIVALVEEYMDWLHQSPVPKFLFWGTPGVLIPPAEAARLAKSLPNCKAVDIGPGLNLLQEDNPDLIGSEIARWLSTLEISG

SEQ ID NO: 2473 - protein, 277 aa, Synthetic construct
MFHYVDVGPRDGTPVLFLHGNPTSSYVWRNIIPHVAPTHRCIAPDLIGMGKSDKPDLGYFFDDHVRFMDAFIEALGLEEVVLVIHDWGSALGFHWAKRNPERVKGIAFMEFIRPIPTWDEWPEFARETFQAFRTTDVGRKLIIDQNVFIEGTLPMGVVRPLTEVEMDHYREPFLNPVDREPLWRFPNELPIAGEPANIVALVEEYMDWLHQSPVPKVLFWGTPGVLIPPAEAARLAKSLPNCKAVDIGPGLNLLQEDNPDLIGSEIARWLSTLEISG

SEQ ID NO: 2474 - protein, 277 aa, Synthetic construct
MFHYVDVGPRDGTPVLFLHGNPTSSYVWRNIIPHVAPTHRCIAPDLIGMGKSDKPDLGYFFDDHVRFMDAFIEALGLEEVVLVIHDWGSALGFHWAKRNPERVKGIAFMEFIRPIPTWDEWPEFARETFQAFRTTDVGRKLIIDQNVFIEGTLPMGVVRPLTEVEMDHYREPFLNPVDREPLWRFPNELPIAGEPANIVALVEEYMDWLHQSPVPKALFWGTPGVLIPPAEAARLAKSLPNCKAVDIGPGLNLLQEDNPDLIGSEIARWLSTLEISG

SEQ ID NO: 2475 - protein, 277 aa, Synthetic construct
MFHYVDVGPRDGTPVLFLHGNPTSSYVWRNIIPHVAPTHRCIAPDLIGMGKSDKPDLGYFFDDHVRFMDAFIEALGLEEVVLVIHDWGSALGFHWAKRNPERVKGIAFMEFIRPIPTWDEWPEFARETFQAFRTTDVGRKLIIDQNVFIEGTLPMGVVRPLTEVEMDHYREPFLNPVDREPLWRFPNELPIAGEPANIVALVEEYMDWLHQSPVPKQLFWGTPGVLIPPAEAARLAKSLPNCKAVDIGPGLNLLQEDNPDLIGSEIARWLSTLEISG

SEQ ID NO: 2476 - protein, 277 aa, Synthetic construct
MFHYVDVGPRDGTPVLFLHGNPTSSYVWRNIIPHVAPTHRCIAPDLIGMGKSDKPDLGYFFDDHVRFMDAFIEALGLEEVVLVIHDWGSALGFHWAKRNPERVKGIAFMEFIRPIPTWDEWPEFARETFQAFRTTDVGRKLIIDQNVFIEGTLPMGVVRPLTEVEMDHYREPFLNPVDREPLWRFPNELPIAGEPANIVALVEEYMDWLHQSPVPKLIFWGTPGVLIPPAEAARLAKSLPNCKAVDIGPGLNLLQEDNPDLIGSEIARWLSTLEISG

SEQ ID NO: 2477 - protein, 277 aa, Synthetic construct
MFHYVDVGPRDGTPVLFLHGNPTSSYVWRNIIPHVAPTHRCIAPDLIGMGKSDKPDLGYFFDDHVRFMDAFIEALGLEEVVLVIHDWGSALGFHWAKRNPERVKGIAFMEFIRPIPTWDEWPEFARETFQAFRTTDVGRKLIIDQNVFIEGTLPMGVVRPLTEVEMDHYREPFLNPVDREPLWRFPNELPIAGEPANIVALVEEYMDWLHQSPVPKLFFWGTPGVLIPPAEAARLAKSLPNCKAVDIGPGLNLLQEDNPDLIGSEIARWLSTLEISG

SEQ ID NO: 2478 - protein, 277 aa, Synthetic construct
MFHYVDVGPRDGTPVLFLHGNPTSSYVWRNIIPHVAPTHRCIAPDLIGMGKSDKPDLGYFFDDHVRFMDAFIEALGLEEVVLVIHDWGSALGFHWAKRNPERVKGIAFMEFIRPIPTWDEWPEFARETFQAFRTTDVGRKLIIDQNVFIEGTLPMGVVRPLTEVEMDHYREPFLNPVDREPLWRFPNELPIAGEPANIVALVEEYMDWLHQSPVPKLVFWGTPGVLIPPAEAARLAKSLPNCKAVDIGPGLNLLQEDNPDLIGSEIARWLSTLEISG

SEQ ID NO: 2479 - protein, 277 aa, Synthetic construct
MFHYVDVGPRDGTPVLFLHGNPTSSYVWRNIIPHVAPTHRCIAPDLIGMGKSDKPDLGYFFDDHVRFMDAFIEALGLEEVVLVIHDWGSALGFHWAKRNPERVKGIAFMEFIRPIPTWDEWPEFARETFQAFRTTDVGRKLIIDQNVFIEGTLPMGVVRPLTEVEMDHYREPFLNPVDREPLWRFPNELPIAGEPANIVALVEEYMDWLHQSPVPKLMFWGTPGVLIPPAEAARLAKSLPNCKAVDIGPGLNLLQEDNPDLIGSEIARWLSTLEISG

SEQ ID NO: 2480 - protein, 277 aa, Synthetic construct
MFHYVDVGPRDGTPVLFLHGNPTSSYVWRNIIPHVAPTHRCIAPDLIGMGKSDKPDLGYFFDDHVRFMDAFIEALGLEEVVLVIHDWGSALGFHWAKRNPERVKGIAFMEFIRPIPTWDEWPEFARETFQAFRTTDVGRKLIIDQNVFIEGTLPMGVVRPLTEVEMDHYREPFLNPVDREPLWRFPNELPIAGEPANIVALVEEYMDWLHQSPVPKLAFWGTPGVLIPPAEAARLAKSLPNCKAVDIGPGLNLLQEDNPDLIGSEIARWLSTLEISG

SEQ ID NO: 2481 - protein, 277 aa, Synthetic construct
MFHYVDVGPRDGTPVLFLHGNPTSSYVWRNIIPHVAPTHRCIAPDLIGMGKSDKPDLGYFFDDHVRFMDAFIEALGLEEVVLVIHDWGSALGFHWAKRNPERVKGIAFMEFIRPIPTWDEWPEFARETFQAFRTTDVGRKLIIDQNVFIEGTLPMGVVRPLTEVEMDHYREPFLNPVDREPLWRFPNELPIAGEPANIVALVEEYMDWLHQSPVPKLYFWGTPGVLIPPAEAARLAKSLPNCKAVDIGPGLNLLQEDNPDLIGSEIARWLSTLEISG

SEQ ID NO: 2482 - protein, 277 aa, Synthetic construct
MFHYVDVGPRDGTPVLFLHGNPTSSYVWRNIIPHVAPTHRCIAPDLIGMGKSDKPDLGYFFDDHVRFMDAFIEALGLEEVVLVIHDWGSALGFHWAKRNPERVKGIAFMEFIRPIPTWDEWPEFARETFQAFRTTDVGRKLIIDQNVFIEGTLPMGVVRPLTEVEMDHYREPFLNPVDREPLWRFPNELPIAGEPANIVALVEEYMDWLHQSPVPKLLLWGTPGVLIPPAEAARLAKSLPNCKAVDIGPGLNLLQEDNPDLIGSEIARWLSTLEISG

SEQ ID NO: 2483 - protein, 277 aa, Synthetic construct
MFHYVDVGPRDGTPVLFLHGNPTSSYVWRNIIPHVAPTHRCIAPDLIGMGKSDKPDLGYFFDDHVRFMDAFIEALGLEEVVLVIHDWGSALGFHWAKRNPERVKGIAFMEFIRPIPTWDEWPEFARETFQAFRTTDVGRKLIIDQNVFIEGTLPMGVVRPLTEVEMDHYREPFLNPVDREPLWRFPNELPIAGEPANIVALVEEYMDWLHQSPVPKLLVWGTPGVLIPPAEAARLAKSLPNCKAVDIGPGLNLLQEDNPDLIGSEIARWLSTLEISG

SEQ ID NO: 2484 - protein, 277 aa, Synthetic construct
MFHYVDVGPRDGTPVLFLHGNPTSSYVWRNIIPHVAPTHRCIAPDLIGMGKSDKPDLGYFFDDHVRFMDAFIEALGLEEVVLVIHDWGSALGFHWAKRNPERVKGIAFMEFIRPIPTWDEWPEFARETFQAFRTTDVGRKLIIDQNVFIEGTLPMGVVRPLTEVEMDHYREPFLNPVDREPLWRFPNELPIAGEPANIVALVEEYMDWLHQSPVPKLLIWGTPGVLIPPAEAARLAKSLPNCKAVDIGPGLNLLQEDNPDLIGSEIARWLSTLEISG

SEQ ID NO: 2485 - protein, 277 aa, Synthetic construct
MFHYVDVGPRDGTPVLFLHGNPTSSYVWRNIIPHVAPTHRCIAPDLIGMGKSDKPDLGYFFDDHVRFMDAFIEALGLEEVVLVIHDWGSALGFHWAKRNPERVKGIAFMEFIRPIPTWDEWPEFARETFQAFRTTDVGRKLIIDQNVFIEGTLPMGVVRPLTEVEMDHYREPFLNPVDREPLWRFPNELPIAGEPANIVALVEEYMDWLHQSPVPKLLMWGTPGVLIPPAEAARLAKSLPNCKAVDIGPGLNLLQEDNPDLIGSEIARWLSTLEISG

SEQ ID NO: 2486 - protein, 277 aa, Synthetic construct
MFHYVDVGPRDGTPVLFLHGNPTSSYVWRNIIPHVAPTHRCIAPDLIGMGKSDKPDLGYFFDDHVRFMDAFIEALGLEEVVLVIHDWGSALGFHWAKRNPERVKGIAFMEFIRPIPTWDEWPEFARETFQAFRTTDVGRKLIIDQNVFIEGTLPMGVVRPLTEVEMDHYREPFLNPVDREPLWRFPNELPIAGEPANIVALVEEYMDWLHQSPVPKLLAWGTPGVLIPPAEAARLAKSLPNCKAVDIGPGLNLLQEDNPDLIGSEIARWLSTLEISG

SEQ ID NO: 2487 - protein, 277 aa, Synthetic construct
MFHYVDVGPRDGTPVLFLHGNPTSSYVWRNIIPHVAPTHRCIAPDLIGMGKSDKPDLGYFFDDHVRFMDAFIEALGLEEVVLVIHDWGSALGFHWAKRNPERVKGIAFMEFIRPIPTWDEWPEFARETFQAFRTTDVGRKLIIDQNVFIEGTLPMGVVRPLTEVEMDHYREPFLNPVDREPLWRFPNELPIAGEPANIVALVEEYMDWLHQSPVPKLLCWGTPGVLIPPAEAARLAKSLPNCKAVDIGPGLNLLQEDNPDLIGSEIARWLSTLEISG

SEQ ID NO: 2488 - protein, 277 aa, Synthetic construct
MFHYVDVGPRDGTPVLFLHGNPTSSYVWRNIIPHVAPTHRCIAPDLIGMGKSDKPDLGYFFDDHVRFMDAFIEALGLEEVVLVIHDWGSALGFHWAKRNPERVKGIAFMEFIRPIPTWDEWPEFARETFQAFRTTDVGRKLIIDQNVFIEGTLPMGVVRPLTEVEMDHYREPFLNPVDREPLWRFPNELPIAGEPANIVALVEEYMDWLHQSPVPKLLFRGTPGVLIPPAEAARLAKSLPNCKAVDIGPGLNLLQEDNPDLIGSEIARWLSTLEISG

SEQ ID NO: 2489 - protein, 277 aa, Synthetic construct
MFHYVDVGPRDGTPVLFLHGNPTSSYVWRNIIPHVAPTHRCIAPDLIGMGKSDKPDLGYFFDDHVRFMDAFIEALGLEEVVLVIHDWGSALGFHWAKRNPERVKGIAFMEFIRPIPTWDEWPEFARETFQAFRTTDVGRKLIIDQNVFIEGTLPMGVVRPLTEVEMDHYREPFLNPVDREPLWRFPNELPIAGEPANIVALVEEYMDWLHQSPVPKLLFYGTPGVLIPPAEAARLAKSLPNCKAVDIGPGLNLLQEDNPDLIGSEIARWLSTLEISG

SEQ ID NO: 2490 - protein, 277 aa, Synthetic construct
MFHYVDVGPRDGTPVLFLHGNPTSSYVWRNIIPHVAPTHRCIAPDLIGMGKSDKPDLGYFFDDHVRFMDAFIEALGLEEVVLVIHDWGSALGFHWAKRNPERVKGIAFMEFIRPIPTWDEWPEFARETFQAFRTTDVGRKLIIDQNVFIEGTLPMGVVRPLTEVEMDHYREPFLNPVDREPLWRFPNELPIAGEPANIVALVEEYMDWLHQSPVPKLLFTGTPGVLIPPAEAARLAKSLPNCKAVDIGPGLNLLQEDNPDLIGSEIARWLSTLEISG

SEQ ID NO: 2491 - protein, 277 aa, Synthetic construct
MFHYVDVGPRDGTPVLFLHGNPTSSYVWRNIIPHVAPTHRCIAPDLIGMGKSDKPDLGYFFDDHVRFMDAFIEALGLEEVVLVIHDWGSALGFHWAKRNPERVKGIAFMEFIRPIPTWDEWPEFARETFQAFRTTDVGRKLIIDQNVFIEGTLPMGVVRPLTEVEMDHYREPFLNPVDREPLWRFPNELPIAGEPANIVALVEEYMDWLHQSPVPKLLFHGTPGVLIPPAEAARLAKSLPNCKAVDIGPGLNLLQEDNPDLIGSEIARWLSTLEISG

SEQ ID NO: 2492 - protein, 277 aa, Synthetic construct
MFHYVDVGPRDGTPVLFLHGNPTSSYVWRNIIPHVAPTHRCIAPDLIGMGKSDKPDLGYFFDDHVRFMDAFIEALGLEEVVLVIHDWGSALGFHWAKRNPERVKGIAFMEFIRPIPTWDEWPEFARETFQAFRTTDVGRKLIIDQNVFIEGTLPMGVVRPLTEVEMDHYREPFLNPVDREPLWRFPNELPIAGEPANIVALVEEYMDWLHQSPVPKLLFFGTPGVLIPPAEAARLAKSLPNCKAVDIGPGLNLLQEDNPDLIGSEIARWLSTLEISG

SEQ ID NO: 2493 - protein, 277 aa, Synthetic construct
MFHYVDVGPRDGTPVLFLHGNPTSSYVWRNIIPHVAPTHRCIAPDLIGMGKSDKPDLGYFFDDHVRFMDAFIEALGLEEVVLVIHDWGSALGFHWAKRNPERVKGIAFMEFIRPIPTWDEWPEFARETFQAFRTTDVGRKLIIDQNVFIEGTLPMGVVRPLTEVEMDHYREPFLNPVDREPLWRFPNELPIAGEPANIVALVEEYMDWLHQSPVPKLLFVGTPGVLIPPAEAARLAKSLPNCKAVDIGPGLNLLQEDNPDLIGSEIARWLSTLEISG

SEQ ID NO: 2494 - protein, 277 aa, Synthetic construct
MFHYVDVGPRDGTPVLFLHGNPTSSYVWRNIIPHVAPTHRCIAPDLIGMGKSDKPDLGYFFDDHVRFMDAFIEALGLEEVVLVIHDWGSALGFHWAKRNPERVKGIAFMEFIRPIPTWDEWPEFARETFQAFRTTDVGRKLIIDQNVFIEGTLPMGVVRPLTEVEMDHYREPFLNPVDREPLWRFPNELPIAGEPANIVALVEEYMDWLHQSPVPKLLFWATPGVLIPPAEAARLAKSLPNCKAVDIGPGLNLLQEDNPDLIGSEIARWLSTLEISG

SEQ ID NO: 2495 - protein, 277 aa, Synthetic construct
MFHYVDVGPRDGTPVLFLHGNPTSSYVWRNIIPHVAPTHRCIAPDLIGMGKSDKPDLGYFFDDHVRFMDAFIEALGLEEVVLVIHDWGSALGFHWAKRNPERVKGIAFMEFIRPIPTWDEWPEFARETFQAFRTTDVGRKLIIDQNVFIEGTLPMGVVRPLTEVEMDHYREPFLNPVDREPLWRFPNELPIAGEPANIVALVEEYMDWLHQSPVPKLLFWSTPGVLIPPAEAARLAKSLPNCKAVDIGPGLNLLQEDNPDLIGSEIARWLSTLEISG

SEQ ID NO: 2496 - protein, 277 aa, Synthetic construct
MFHYVDVGPRDGTPVLFLHGNPTSSYVWRNIIPHVAPTHRCIAPDLIGMGKSDKPDLGYFFDDHVRFMDAFIEALGLEEVVLVIHDWGSALGFHWAKRNPERVKGIAFMEFIRPIPTWDEWPEFARETFQAFRTTDVGRKLIIDQNVFIEGTLPMGVVRPLTEVEMDHYREPFLNPVDREPLWRFPNELPIAGEPANIVALVEEYMDWLHQSPVPKLLFWTTPGVLIPPAEAARLAKSLPNCKAVDIGPGLNLLQEDNPDLIGSEIARWLSTLEISG

SEQ ID NO: 2497 - protein, 277 aa, Synthetic construct
MFHYVDVGPRDGTPVLFLHGNPTSSYVWRNIIPHVAPTHRCIAPDLIGMGKSDKPDLGYFFDDHVRFMDAFIEALGLEEVVLVIHDWGSALGFHWAKRNPERVKGIAFMEFIRPIPTWDEWPEFARETFQAFRTTDVGRKLIIDQNVFIEGTLPMGVVRPLTEVEMDHYREPFLNPVDREPLWRFPNELPIAGEPANIVALVEEYMDWLHQSPVPKLLFWPTPGVLIPPAEAARLAKSLPNCKAVDIGPGLNLLQEDNPDLIGSEIARWLSTLEISG

SEQ ID NO: 2498 - protein, 277 aa, Synthetic construct
MFHYVDVGPRDGTPVLFLHGNPTSSYVWRNIIPHVAPTHRCIAPDLIGMGKSDKPDLGYFFDDHVRFMDAFIEALGLEEVVLVIHDWGSALGFHWAKRNPERVKGIAFMEFIRPIPTWDEWPEFARETFQAFRTTDVGRKLIIDQNVFIEGTLPMGVVRPLTEVEMDHYREPFLNPVDREPLWRFPNELPIAGEPANIVALVEEYMDWLHQSPVPKLLFWCTPGVLIPPAEAARLAKSLPNCKAVDIGPGLNLLQEDNPDLIGSEIARWLSTLEISG

SEQ ID NO: 2499 - protein, 277 aa, Synthetic construct
MFHYVDVGPRDGTPVLFLHGNPTSSYVWRNIIPHVAPTHRCIAPDLIGMGKSDKPDLGYFFDDHVRFMDAFIEALGLEEVVLVIHDWGSALGFHWAKRNPERVKGIAFMEFIRPIPTWDEWPEFARETFQAFRTTDVGRKLIIDQNVFIEGTLPMGVVRPLTEVEMDHYREPFLNPVDREPLWRFPNELPIAGEPANIVALVEEYMDWLHQSPVPKLLFWVTPGVLIPPAEAARLAKSLPNCKAVDIGPGLNLLQEDNPDLIGSEIARWLSTLEISG

SEQ ID NO: 2500 - protein, 277 aa, Synthetic construct
MFHYVDVGPRDGTPVLFLHGNPTSSYVWRNIIPHVAPTHRCIAPDLIGMGKSDKPDLGYFFDDHVRFMDAFIEALGLEEVVLVIHDWGSALGFHWAKRNPERVKGIAFMEFIRPIPTWDEWPEFARETFQAFRTTDVGRKLIIDQNVFIEGTLPMGVVRPLTEVEMDHYREPFLNPVDREPLWRFPNELPIAGEPANIVALVEEYMDWLHQSPVPKLLFWGKPGVLIPPAEAARLAKSLPNCKAVDIGPGLNLLQEDNPDLIGSEIARWLSTLEISG

SEQ ID NO: 2501 - protein, 277 aa, Synthetic construct
MFHYVDVGPRDGTPVLFLHGNPTSSYVWRNIIPHVAPTHRCIAPDLIGMGKSDKPDLGYFFDDHVRFMDAFIEALGLEEVVLVIHDWGSALGFHWAKRNPERVKGIAFMEFIRPIPTWDEWPEFARETFQAFRTTDVGRKLIIDQNVFIEGTLPMGVVRPLTEVEMDHYREPFLNPVDREPLWRFPNELPIAGEPANIVALVEEYMDWLHQSPVPKLLFWGEPGVLIPPAEAARLAKSLPNCKAVDIGPGLNLLQEDNPDLIGSEIARWLSTLEISG

SEQ ID NO: 2502 - protein, 277 aa, Synthetic construct
MFHYVDVGPRDGTPVLFLHGNPTSSYVWRNIIPHVAPTHRCIAPDLIGMGKSDKPDLGYFFDDHVRFMDAFIEALGLEEVVLVIHDWGSALGFHWAKRNPERVKGIAFMEFIRPIPTWDEWPEFARETFQAFRTTDVGRKLIIDQNVFIEGTLPMGVVRPLTEVEMDHYREPFLNPVDREPLWRFPNELPIAGEPANIVALVEEYMDWLHQSPVPKLLFWGNPGVLIPPAEAARLAKSLPNCKAVDIGPGLNLLQEDNPDLIGSEIARWLSTLEISG

SEQ ID NO: 2503 - protein, 277 aa, Synthetic construct
MFHYVDVGPRDGTPVLFLHGNPTSSYVWRNIIPHVAPTHRCIAPDLIGMGKSDKPDLGYFFDDHVRFMDAFIEALGLEEVVLVIHDWGSALGFHWAKRNPERVKGIAFMEFIRPIPTWDEWPEFARETFQAFRTTDVGRKLIIDQNVFIEGTLPMGVVRPLTEVEMDHYREPFLNPVDREPLWRFPNELPIAGEPANIVALVEEYMDWLHQSPVPKLLFWGAPGVLIPPAEAARLAKSLPNCKAVDIGPGLNLLQEDNPDLIGSEIARWLSTLEISG

SEQ ID NO: 2504 - protein, 277 aa, Synthetic construct
MFHYVDVGPRDGTPVLFLHGNPTSSYVWRNIIPHVAPTHRCIAPDLIGMGKSDKPDLGYFFDDHVRFMDAFIEALGLEEVVLVIHDWGSALGFHWAKRNPERVKGIAFMEFIRPIPTWDEWPEFARETFQAFRTTDVGRKLIIDQNVFIEGTLPMGVVRPLTEVEMDHYREPFLNPVDREPLWRFPNELPIAGEPANIVALVEEYMDWLHQSPVPKLLFWGRPGVLIPPAEAARLAKSLPNCKAVDIGPGLNLLQEDNPDLIGSEIARWLSTLEISG

SEQ ID NO: 2505 - protein, 277 aa, Synthetic construct
MFHYVDVGPRDGTPVLFLHGNPTSSYVWRNIIPHVAPTHRCIAPDLIGMGKSDKPDLGYFFDDHVRFMDAFIEALGLEEVVLVIHDWGSALGFHWAKRNPERVKGIAFMEFIRPIPTWDEWPEFARETFQAFRTTDVGRKLIIDQNVFIEGTLPMGVVRPLTEVEMDHYREPFLNPVDREPLWRFPNELPIAGEPANIVALVEEYMDWLHQSPVPKLLFWGDPGVLIPPAEAARLAKSLPNCKAVDIGPGLNLLQEDNPDLIGSEIARWLSTLEISG

SEQ ID NO: 2506 - protein, 277 aa, Synthetic construct
MFHYVDVGPRDGTPVLFLHGNPTSSYVWRNIIPHVAPTHRCIAPDLIGMGKSDKPDLGYFFDDHVRFMDAFIEALGLEEVVLVIHDWGSALGFHWAKRNPERVKGIAFMEFIRPIPTWDEWPEFARETFQAFRTTDVGRKLIIDQNVFIEGTLPMGVVRPLTEVEMDHYREPFLNPVDREPLWRFPNELPIAGEPANIVALVEEYMDWLHQSPVPKLLFWGTEGVLIPPAEAARLAKSLPNCKAVDIGPGLNLLQEDNPDLIGSEIARWLSTLEISG

SEQ ID NO: 2507 - protein, 277 aa, Synthetic construct
MFHYVDVGPRDGTPVLFLHGNPTSSYVWRNIIPHVAPTHRCIAPDLIGMGKSDKPDLGYFFDDHVRFMDAFIEALGLEEVVLVIHDWGSALGFHWAKRNPERVKGIAFMEFIRPIPTWDEWPEFARETFQAFRTTDVGRKLIIDQNVFIEGTLPMGVVRPLTEVEMDHYREPFLNPVDREPLWRFPNELPIAGEPANIVALVEEYMDWLHQSPVPKLLFWGTKGVLIPPAEAARLAKSLPNCKAVDIGPGLNLLQEDNPDLIGSEIARWLSTLEISG

SEQ ID NO: 2508 - protein, 277 aa, Synthetic construct
MFHYVDVGPRDGTPVLFLHGNPTSSYVWRNIIPHVAPTHRCIAPDLIGMGKSDKPDLGYFFDDHVRFMDAFIEALGLEEVVLVIHDWGSALGFHWAKRNPERVKGIAFMEFIRPIPTWDEWPEFARETFQAFRTTDVGRKLIIDQNVFIEGTLPMGVVRPLTEVEMDHYREPFLNPVDREPLWRFPNELPIAGEPANIVALVEEYMDWLHQSPVPKLLFWGTAGVLIPPAEAARLAKSLPNCKAVDIGPGLNLLQEDNPDLIGSEIARWLSTLEISG

SEQ ID NO: 2509 - protein, 277 aa, Synthetic construct
MFHYVDVGPRDGTPVLFLHGNPTSSYVWRNIIPHVAPTHRCIAPDLIGMGKSDKPDLGYFFDDHVRFMDAFIEALGLEEVVLVIHDWGSALGFHWAKRNPERVKGIAFMEFIRPIPTWDEWPEFARETFQAFRTTDVGRKLIIDQNVFIEGTLPMGVVRPLTEVEMDHYREPFLNPVDREPLWRFPNELPIAGEPANIVALVEEYMDWLHQSPVPKLLFWGTDGVLIPPAEAARLAKSLPNCKAVDIGPGLNLLQEDNPDLIGSEIARWLSTLEISG

SEQ ID NO: 2510 - protein, 277 aa, Synthetic construct
MFHYVDVGPRDGTPVLFLHGNPTSSYVWRNIIPHVAPTHRCIAPDLIGMGKSDKPDLGYFFDDHVRFMDAFIEALGLEEVVLVIHDWGSALGFHWAKRNPERVKGIAFMEFIRPIPTWDEWPEFARETFQAFRTTDVGRKLIIDQNVFIEGTLPMGVVRPLTEVEMDHYREPFLNPVDREPLWRFPNELPIAGEPANIVALVEEYMDWLHQSPVPKLLFWGTSGVLIPPAEAARLAKSLPNCKAVDIGPGLNLLQEDNPDLIGSEIARWLSTLEISG

SEQ ID NO: 2511 - protein, 277 aa, Synthetic construct
MFHYVDVGPRDGTPVLFLHGNPTSSYVWRNIIPHVAPTHRCIAPDLIGMGKSDKPDLGYFFDDHVRFMDAFIEALGLEEVVLVIHDWGSALGFHWAKRNPERVKGIAFMEFIRPIPTWDEWPEFARETFQAFRTTDVGRKLIIDQNVFIEGTLPMGVVRPLTEVEMDHYREPFLNPVDREPLWRFPNELPIAGEPANIVALVEEYMDWLHQSPVPKLLFWGTQGVLIPPAEAARLAKSLPNCKAVDIGPGLNLLQEDNPDLIGSEIARWLSTLEISG

SEQ ID NO: 2512 - protein, 277 aa, Synthetic construct
MFHYVDVGPRDGTPVLFLHGNPTSSYVWRNIIPHVAPTHRCIAPDLIGMGKSDKPDLGYFFDDHVRFMDAFIEALGLEEVVLVIHDWGSALGFHWAKRNPERVKGIAFMEFIRPIPTWDEWPEFARETFQAFRTTDVGRKLIIDQNVFIEGTLPMGVVRPLTEVEMDHYREPFLNPVDREPLWRFPNELPIAGEPANIVALVEEYMDWLHQSPVPKLLFWGTPSVLIPPAEAARLAKSLPNCKAVDIGPGLNLLQEDNPDLIGSEIARWLSTLEISG

SEQ ID NO: 2513 - protein, 277 aa, Synthetic construct
MFHYVDVGPRDGTPVLFLHGNPTSSYVWRNIIPHVAPTHRCIAPDLIGMGKSDKPDLGYFFDDHVRFMDAFIEALGLEEVVLVIHDWGSALGFHWAKRNPERVKGIAFMEFIRPIPTWDEWPEFARETFQAFRTTDVGRKLIIDQNVFIEGTLPMGVVRPLTEVEMDHYREPFLNPVDREPLWRFPNELPIAGEPANIVALVEEYMDWLHQSPVPKLLFWGTPAVLIPPAEAARLAKSLPNCKAVDIGPGLNLLQEDNPDLIGSEIARWLSTLEISG

SEQ ID NO: 2514 - protein, 277 aa, Synthetic construct
MFHYVDVGPRDGTPVLFLHGNPTSSYVWRNIIPHVAPTHRCIAPDLIGMGKSDKPDLGYFFDDHVRFMDAFIEALGLEEVVLVIHDWGSALGFHWAKRNPERVKGIAFMEFIRPIPTWDEWPEFARETFQAFRTTDVGRKLIIDQNVFIEGTLPMGVVRPLTEVEMDHYREPFLNPVDREPLWRFPNELPIAGEPANIVALVEEYMDWLHQSPVPKLLFWGTPDVLIPPAEAARLAKSLPNCKAVDIGPGLNLLQEDNPDLIGSEIARWLSTLEISG

SEQ ID NO: 2515 - protein, 277 aa, Synthetic construct
MFHYVDVGPRDGTPVLFLHGNPTSSYVWRNIIPHVAPTHRCIAPDLIGMGKSDKPDLGYFFDDHVRFMDAFIEALGLEEVVLVIHDWGSALGFHWAKRNPERVKGIAFMEFIRPIPTWDEWPEFARETFQAFRTTDVGRKLIIDQNVFIEGTLPMGVVRPLTEVEMDHYREPFLNPVDREPLWRFPNELPIAGEPANIVALVEEYMDWLHQSPVPKLLFWGTPNVLIPPAEAARLAKSLPNCKAVDIGPGLNLLQEDNPDLIGSEIARWLSTLEISG

SEQ ID NO: 2516 - protein, 277 aa, Synthetic construct
MFHYVDVGPRDGTPVLFLHGNPTSSYVWRNIIPHVAPTHRCIAPDLIGMGKSDKPDLGYFFDDHVRFMDAFIEALGLEEVVLVIHDWGSALGFHWAKRNPERVKGIAFMEFIRPIPTWDEWPEFARETFQAFRTTDVGRKLIIDQNVFIEGTLPMGVVRPLTEVEMDHYREPFLNPVDREPLWRFPNELPIAGEPANIVALVEEYMDWLHQSPVPKLLFWGTPTVLIPPAEAARLAKSLPNCKAVDIGPGLNLLQEDNPDLIGSEIARWLSTLEISG

SEQ ID NO: 2517 - protein, 277 aa, Synthetic construct
MFHYVDVGPRDGTPVLFLHGNPTSSYVWRNIIPHVAPTHRCIAPDLIGMGKSDKPDLGYFFDDHVRFMDAFIEALGLEEVVLVIHDWGSALGFHWAKRNPERVKGIAFMEFIRPIPTWDEWPEFARETFQAFRTTDVGRKLIIDQNVFIEGTLPMGVVRPLTEVEMDHYREPFLNPVDREPLWRFPNELPIAGEPANIVALVEEYMDWLHQSPVPKLLFWGTPPVLIPPAEAARLAKSLPNCKAVDIGPGLNLLQEDNPDLIGSEIARWLSTLEISG

SEQ ID NO: 2518 - protein, 277 aa, Synthetic construct
MFHYVDVGPRDGTPVLFLHGNPTSSYVWRNIIPHVAPTHRCIAPDLIGMGKSDKPDLGYFFDDHVRFMDAFIEALGLEEVVLVIHDWGSALGFHWAKRNPERVKGIAFMEFIRPIPTWDEWPEFARETFQAFRTTDVGRKLIIDQNVFIEGTLPMGVVRPLTEVEMDHYREPFLNPVDREPLWRFPNELPIAGEPANIVALVEEYMDWLHQSPVPKLLFWGTPGALIPPAEAARLAKSLPNCKAVDIGPGLNLLQEDNPDLIGSEIARWLSTLEISG

SEQ ID NO: 2519 - protein, 277 aa, Synthetic construct
MFHYVDVGPRDGTPVLFLHGNPTSSYVWRNIIPHVAPTHRCIAPDLIGMGKSDKPDLGYFFDDHVRFMDAFIEALGLEEVVLVIHDWGSALGFHWAKRNPERVKGIAFMEFIRPIPTWDEWPEFARETFQAFRTTDVGRKLIIDQNVFIEGTLPMGVVRPLTEVEMDHYREPFLNPVDREPLWRFPNELPIAGEPANIVALVEEYMDWLHQSPVPKLLFWGTPGSLIPPAEAARLAKSLPNCKAVDIGPGLNLLQEDNPDLIGSEIARWLSTLEISG

SEQ ID NO: 2520 - protein, 277 aa, Synthetic construct
MFHYVDVGPRDGTPVLFLHGNPTSSYVWRNIIPHVAPTHRCIAPDLIGMGKSDKPDLGYFFDDHVRFMDAFIEALGLEEVVLVIHDWGSALGFHWAKRNPERVKGIAFMEFIRPIPTWDEWPEFARETFQAFRTTDVGRKLIIDQNVFIEGTLPMGVVRPLTEVEMDHYREPFLNPVDREPLWRFPNELPIAGEPANIVALVEEYMDWLHQSPVPKLLFWGTPGTLIPPAEAARLAKSLPNCKAVDIGPGLNLLQEDNPDLIGSEIARWLSTLEISG

SEQ ID NO: 2521 - protein, 277 aa, Synthetic construct
MFHYVDVGPRDGTPVLFLHGNPTSSYVWRNIIPHVAPTHRCIAPDLIGMGKSDKPDLGYFFDDHVRFMDAFIEALGLEEVVLVIHDWGSALGFHWAKRNPERVKGIAFMEFIRPIPTWDEWPEFARETFQAFRTTDVGRKLIIDQNVFIEGTLPMGVVRPLTEVEMDHYREPFLNPVDREPLWRFPNELPIAGEPANIVALVEEYMDWLHQSPVPKLLFWGTPGGLIPPAEAARLAKSLPNCKAVDIGPGLNLLQEDNPDLIGSEIARWLSTLEISG

SEQ ID NO: 2522 - protein, 277 aa, Synthetic construct
MFHYVDVGPRDGTPVLFLHGNPTSSYVWRNIIPHVAPTHRCIAPDLIGMGKSDKPDLGYFFDDHVRFMDAFIEALGLEEVVLVIHDWGSALGFHWAKRNPERVKGIAFMEFIRPIPTWDEWPEFARETFQAFRTTDVGRKLIIDQNVFIEGTLPMGVVRPLTEVEMDHYREPFLNPVDREPLWRFPNELPIAGEPANIVALVEEYMDWLHQSPVPKLLFWGTPGPLIPPAEAARLAKSLPNCKAVDIGPGLNLLQEDNPDLIGSEIARWLSTLEISG

SEQ ID NO: 2523 - protein, 277 aa, Synthetic construct
MFHYVDVGPRDGTPVLFLHGNPTSSYVWRNIIPHVAPTHRCIAPDLIGMGKSDKPDLGYFFDDHVRFMDAFIEALGLEEVVLVIHDWGSALGFHWAKRNPERVKGIAFMEFIRPIPTWDEWPEFARETFQAFRTTDVGRKLIIDQNVFIEGTLPMGVVRPLTEVEMDHYREPFLNPVDREPLWRFPNELPIAGEPANIVALVEEYMDWLHQSPVPKLLFWGTPGRLIPPAEAARLAKSLPNCKAVDIGPGLNLLQEDNPDLIGSEIARWLSTLEISG

SEQ ID NO: 2524 - protein, 277 aa, Synthetic construct
MFHYVDVGPRDGTPVLFLHGNPTSSYVWRNIIPHVAPTHRCIAPDLIGMGKSDKPDLGYFFDDHVRFMDAFIEALGLEEVVLVIHDWGSALGFHWAKRNPERVKGIAFMEFIRPIPTWDEWPEFARETFQAFRTTDVGRKLIIDQNVFIEGTLPMGVVRPLTEVEMDHYREPFLNPVDREPLWRFPNELPIAGEPANIVALVEEYMDWLHQSPVPKLLFWGTPGVIIPPAEAARLAKSLPNCKAVDIGPGLNLLQEDNPDLIGSEIARWLSTLEISG

SEQ ID NO: 2525 - protein, 277 aa, Synthetic construct
MFHYVDVGPRDGTPVLFLHGNPTSSYVWRNIIPHVAPTHRCIAPDLIGMGKSDKPDLGYFFDDHVRFMDAFIEALGLEEVVLVIHDWGSALGFHWAKRNPERVKGIAFMEFIRPIPTWDEWPEFARETFQAFRTTDVGRKLIIDQNVFIEGTLPMGVVRPLTEVEMDHYREPFLNPVDREPLWRFPNELPIAGEPANIVALVEEYMDWLHQSPVPKLLFWGTPGVVIPPAEAARLAKSLPNCKAVDIGPGLNLLQEDNPDLIGSEIARWLSTLEISG

SEQ ID NO: 2526 - protein, 277 aa, Synthetic construct
MFHYVDVGPRDGTPVLFLHGNPTSSYVWRNIIPHVAPTHRCIAPDLIGMGKSDKPDLGYFFDDHVRFMDAFIEALGLEEVVLVIHDWGSALGFHWAKRNPERVKGIAFMEFIRPIPTWDEWPEFARETFQAFRTTDVGRKLIIDQNVFIEGTLPMGVVRPLTEVEMDHYREPFLNPVDREPLWRFPNELPIAGEPANIVALVEEYMDWLHQSPVPKLLFWGTPGVFIPPAEAARLAKSLPNCKAVDIGPGLNLLQEDNPDLIGSEIARWLSTLEISG

SEQ ID NO: 2527 - protein, 277 aa, Synthetic construct
MFHYVDVGPRDGTPVLFLHGNPTSSYVWRNIIPHVAPTHRCIAPDLIGMGKSDKPDLGYFFDDHVRFMDAFIEALGLEEVVLVIHDWGSALGFHWAKRNPERVKGIAFMEFIRPIPTWDEWPEFARETFQAFRTTDVGRKLIIDQNVFIEGTLPMGVVRPLTEVEMDHYREPFLNPVDREPLWRFPNELPIAGEPANIVALVEEYMDWLHQSPVPKLLFWGTPGVMIPPAEAARLAKSLPNCKAVDIGPGLNLLQEDNPDLIGSEIARWLSTLEISG

SEQ ID NO: 2528 - protein, 277 aa, Synthetic construct
MFHYVDVGPRDGTPVLFLHGNPTSSYVWRNIIPHVAPTHRCIAPDLIGMGKSDKPDLGYFFDDHVRFMDAFIEALGLEEVVLVIHDWGSALGFHWAKRNPERVKGIAFMEFIRPIPTWDEWPEFARETFQAFRTTDVGRKLIIDQNVFIEGTLPMGVVRPLTEVEMDHYREPFLNPVDREPLWRFPNELPIAGEPANIVALVEEYMDWLHQSPVPKLLFWGTPGVAIPPAEAARLAKSLPNCKAVDIGPGLNLLQEDNPDLIGSEIARWLSTLEISG

SEQ ID NO: 2529 - protein, 277 aa, Synthetic construct
MFHYVDVGPRDGTPVLFLHGNPTSSYVWRNIIPHVAPTHRCIAPDLIGMGKSDKPDLGYFFDDHVRFMDAFIEALGLEEVVLVIHDWGSALGFHWAKRNPERVKGIAFMEFIRPIPTWDEWPEFARETFQAFRTTDVGRKLIIDQNVFIEGTLPMGVVRPLTEVEMDHYREPFLNPVDREPLWRFPNELPIAGEPANIVALVEEYMDWLHQSPVPKLLFWGTPGVTIPPAEAARLAKSLPNCKAVDIGPGLNLLQEDNPDLIGSEIARWLSTLEISG

SEQ ID NO: 2530 - protein, 277 aa, Synthetic construct
MFHYVDVGPRDGTPVLFLHGNPTSSYVWRNIIPHVAPTHRCIAPDLIGMGKSDKPDLGYFFDDHVRFMDAFIEALGLEEVVLVIHDWGSALGFHWAKRNPERVKGIAFMEFIRPIPTWDEWPEFARETFQAFRTTDVGRKLIIDQNVFIEGTLPMGVVRPLTEVEMDHYREPFLNPVDREPLWRFPNELPIAGEPANIVALVEEYMDWLHQSPVPKLLFWGTPGVLLPPAEAARLAKSLPNCKAVDIGPGLNLLQEDNPDLIGSEIARWLSTLEISG

SEQ ID NO: 2531 - protein, 277 aa, Synthetic construct
MFHYVDVGPRDGTPVLFLHGNPTSSYVWRNIIPHVAPTHRCIAPDLIGMGKSDKPDLGYFFDDHVRFMDAFIEALGLEEVVLVIHDWGSALGFHWAKRNPERVKGIAFMEFIRPIPTWDEWPEFARETFQAFRTTDVGRKLIIDQNVFIEGTLPMGVVRPLTEVEMDHYREPFLNPVDREPLWRFPNELPIAGEPANIVALVEEYMDWLHQSPVPKLLFWGTPGVLFPPAEAARLAKSLPNCKAVDIGPGLNLLQEDNPDLIGSEIARWLSTLEISG

SEQ ID NO: 2532 - protein, 277 aa, Synthetic construct
MFHYVDVGPRDGTPVLFLHGNPTSSYVWRNIIPHVAPTHRCIAPDLIGMGKSDKPDLGYFFDDHVRFMDAFIEALGLEEVVLVIHDWGSALGFHWAKRNPERVKGIAFMEFIRPIPTWDEWPEFARETFQAFRTTDVGRKLIIDQNVFIEGTLPMGVVRPLTEVEMDHYREPFLNPVDREPLWRFPNELPIAGEPANIVALVEEYMDWLHQSPVPKLLFWGTPGVLMPPAEAARLAKSLPNCKAVDIGPGLNLLQEDNPDLIGSEIARWLSTLEISG

SEQ ID NO: 2533 - protein, 277 aa, Synthetic construct
MFHYVDVGPRDGTPVLFLHGNPTSSYVWRNIIPHVAPTHRCIAPDLIGMGKSDKPDLGYFFDDHVRFMDAFIEALGLEEVVLVIHDWGSALGFHWAKRNPERVKGIAFMEFIRPIPTWDEWPEFARETFQAFRTTDVGRKLIIDQNVFIEGTLPMGVVRPLTEVEMDHYREPFLNPVDREPLWRFPNELPIAGEPANIVALVEEYMDWLHQSPVPKLLFWGTPGVLVPPAEAARLAKSLPNCKAVDIGPGLNLLQEDNPDLIGSEIARWLSTLEISG

SEQ ID NO: 2534 - protein, 277 aa, Synthetic construct
MFHYVDVGPRDGTPVLFLHGNPTSSYVWRNIIPHVAPTHRCIAPDLIGMGKSDKPDLGYFFDDHVRFMDAFIEALGLEEVVLVIHDWGSALGFHWAKRNPERVKGIAFMEFIRPIPTWDEWPEFARETFQAFRTTDVGRKLIIDQNVFIEGTLPMGVVRPLTEVEMDHYREPFLNPVDREPLWRFPNELPIAGEPANIVALVEEYMDWLHQSPVPKLLFWGTPGVLAPPAEAARLAKSLPNCKAVDIGPGLNLLQEDNPDLIGSEIARWLSTLEISG

SEQ ID NO: 2535 - protein, 277 aa, Synthetic construct
MFHYVDVGPRDGTPVLFLHGNPTSSYVWRNIIPHVAPTHRCIAPDLIGMGKSDKPDLGYFFDDHVRFMDAFIEALGLEEVVLVIHDWGSALGFHWAKRNPERVKGIAFMEFIRPIPTWDEWPEFARETFQAFRTTDVGRKLIIDQNVFIEGTLPMGVVRPLTEVEMDHYREPFLNPVDREPLWRFPNELPIAGEPANIVALVEEYMDWLHQSPVPKLLFWGTPGVLTPPAEAARLAKSLPNCKAVDIGPGLNLLQEDNPDLIGSEIARWLSTLEISG

SEQ ID NO: 2536 - protein, 277 aa, Synthetic construct
MFHYVDVGPRDGTPVLFLHGNPTSSYVWRNIIPHVAPTHRCIAPDLIGMGKSDKPDLGYFFDDHVRFMDAFIEALGLEEVVLVIHDWGSALGFHWAKRNPERVKGIAFMEFIRPIPTWDEWPEFARETFQAFRTTDVGRKLIIDQNVFIEGTLPMGVVRPLTEVEMDHYREPFLNPVDREPLWRFPNELPIAGEPANIVALVEEYMDWLHQSPVPKLLFWGTPGVLITPAEAARLAKSLPNCKAVDIGPGLNLLQEDNPDLIGSEIARWLSTLEISG

SEQ ID NO: 2537 - protein, 277 aa, Synthetic construct
MFHYVDVGPRDGTPVLFLHGNPTSSYVWRNIIPHVAPTHRCIAPDLIGMGKSDKPDLGYFFDDHVRFMDAFIEALGLEEVVLVIHDWGSALGFHWAKRNPERVKGIAFMEFIRPIPTWDEWPEFARETFQAFRTTDVGRKLIIDQNVFIEGTLPMGVVRPLTEVEMDHYREPFLNPVDREPLWRFPNELPIAGEPANIVALVEEYMDWLHQSPVPKLLFWGTPGVLIGPAEAARLAKSLPNCKAVDIGPGLNLLQEDNPDLIGSEIARWLSTLEISG

SEQ ID NO: 2538 - protein, 277 aa, Synthetic construct
MFHYVDVGPRDGTPVLFLHGNPTSSYVWRNIIPHVAPTHRCIAPDLIGMGKSDKPDLGYFFDDHVRFMDAFIEALGLEEVVLVIHDWGSALGFHWAKRNPERVKGIAFMEFIRPIPTWDEWPEFARETFQAFRTTDVGRKLIIDQNVFIEGTLPMGVVRPLTEVEMDHYREPFLNPVDREPLWRFPNELPIAGEPANIVALVEEYMDWLHQSPVPKLLFWGTPGVLISPAEAARLAKSLPNCKAVDIGPGLNLLQEDNPDLIGSEIARWLSTLEISG

SEQ ID NO: 2539 - protein, 277 aa, Synthetic construct
MFHYVDVGPRDGTPVLFLHGNPTSSYVWRNIIPHVAPTHRCIAPDLIGMGKSDKPDLGYFFDDHVRFMDAFIEALGLEEVVLVIHDWGSALGFHWAKRNPERVKGIAFMEFIRPIPTWDEWPEFARETFQAFRTTDVGRKLIIDQNVFIEGTLPMGVVRPLTEVEMDHYREPFLNPVDREPLWRFPNELPIAGEPANIVALVEEYMDWLHQSPVPKLLFWGTPGVLIAPAEAARLAKSLPNCKAVDIGPGLNLLQEDNPDLIGSEIARWLSTLEISG

SEQ ID NO: 2540 - protein, 277 aa, Synthetic construct
MFHYVDVGPRDGTPVLFLHGNPTSSYVWRNIIPHVAPTHRCIAPDLIGMGKSDKPDLGYFFDDHVRFMDAFIEALGLEEVVLVIHDWGSALGFHWAKRNPERVKGIAFMEFIRPIPTWDEWPEFARETFQAFRTTDVGRKLIIDQNVFIEGTLPMGVVRPLTEVEMDHYREPFLNPVDREPLWRFPNELPIAGEPANIVALVEEYMDWLHQSPVPKLLFWGTPGVLIRPAEAARLAKSLPNCKAVDIGPGLNLLQEDNPDLIGSEIARWLSTLEISG

SEQ ID NO: 2541 - protein, 277 aa, Synthetic construct
MFHYVDVGPRDGTPVLFLHGNPTSSYVWRNIIPHVAPTHRCIAPDLIGMGKSDKPDLGYFFDDHVRFMDAFIEALGLEEVVLVIHDWGSALGFHWAKRNPERVKGIAFMEFIRPIPTWDEWPEFARETFQAFRTTDVGRKLIIDQNVFIEGTLPMGVVRPLTEVEMDHYREPFLNPVDREPLWRFPNELPIAGEPANIVALVEEYMDWLHQSPVPKLLFWGTPGVLIKPAEAARLAKSLPNCKAVDIGPGLNLLQEDNPDLIGSEIARWLSTLEISG

SEQ ID NO: 2542 - protein, 277 aa, Synthetic construct
MFHYVDVGPRDGTPVLFLHGNPTSSYVWRNIIPHVAPTHRCIAPDLIGMGKSDKPDLGYFFDDHVRFMDAFIEALGLEEVVLVIHDWGSALGFHWAKRNPERVKGIAFMEFIRPIPTWDEWPEFARETFQAFRTTDVGRKLIIDQNVFIEGTLPMGVVRPLTEVEMDHYREPFLNPVDREPLWRFPNELPIAGEPANIVALVEEYMDWLHQSPVPKLLFWGTPGVLIPAAEAARLAKSLPNCKAVDIGPGLNLLQEDNPDLIGSEIARWLSTLEISG

SEQ ID NO: 2543 - protein, 277 aa, Synthetic construct
MFHYVDVGPRDGTPVLFLHGNPTSSYVWRNIIPHVAPTHRCIAPDLIGMGKSDKPDLGYFFDDHVRFMDAFIEALGLEEVVLVIHDWGSALGFHWAKRNPERVKGIAFMEFIRPIPTWDEWPEFARETFQAFRTTDVGRKLIIDQNVFIEGTLPMGVVRPLTEVEMDHYREPFLNPVDREPLWRFPNELPIAGEPANIVALVEEYMDWLHQSPVPKLLFWGTPGVLIPKAEAARLAKSLPNCKAVDIGPGLNLLQEDNPDLIGSEIARWLSTLEISG

SEQ ID NO: 2544 - protein, 277 aa, Synthetic construct
MFHYVDVGPRDGTPVLFLHGNPTSSYVWRNIIPHVAPTHRCIAPDLIGMGKSDKPDLGYFFDDHVRFMDAFIEALGLEEVVLVIHDWGSALGFHWAKRNPERVKGIAFMEFIRPIPTWDEWPEFARETFQAFRTTDVGRKLIIDQNVFIEGTLPMGVVRPLTEVEMDHYREPFLNPVDREPLWRFPNELPIAGEPANIVALVEEYMDWLHQSPVPKLLFWGTPGVLIPRAEAARLAKSLPNCKAVDIGPGLNLLQEDNPDLIGSEIARWLSTLEISG

SEQ ID NO: 2545 - protein, 277 aa, Synthetic construct
MFHYVDVGPRDGTPVLFLHGNPTSSYVWRNIIPHVAPTHRCIAPDLIGMGKSDKPDLGYFFDDHVRFMDAFIEALGLEEVVLVIHDWGSALGFHWAKRNPERVKGIAFMEFIRPIPTWDEWPEFARETFQAFRTTDVGRKLIIDQNVFIEGTLPMGVVRPLTEVEMDHYREPFLNPVDREPLWRFPNELPIAGEPANIVALVEEYMDWLHQSPVPKLLFWGTPGVLIPEAEAARLAKSLPNCKAVDIGPGLNLLQEDNPDLIGSEIARWLSTLEISG

SEQ ID NO: 2546 - protein, 277 aa, Synthetic construct
MFHYVDVGPRDGTPVLFLHGNPTSSYVWRNIIPHVAPTHRCIAPDLIGMGKSDKPDLGYFFDDHVRFMDAFIEALGLEEVVLVIHDWGSALGFHWAKRNPERVKGIAFMEFIRPIPTWDEWPEFARETFQAFRTTDVGRKLIIDQNVFIEGTLPMGVVRPLTEVEMDHYREPFLNPVDREPLWRFPNELPIAGEPANIVALVEEYMDWLHQSPVPKLLFWGTPGVLIPQAEAARLAKSLPNCKAVDIGPGLNLLQEDNPDLIGSEIARWLSTLEISG

SEQ ID NO: 2547 - protein, 277 aa, Synthetic construct
MFHYVDVGPRDGTPVLFLHGNPTSSYVWRNIIPHVAPTHRCIAPDLIGMGKSDKPDLGYFFDDHVRFMDAFIEALGLEEVVLVIHDWGSALGFHWAKRNPERVKGIAFMEFIRPIPTWDEWPEFARETFQAFRTTDVGRKLIIDQNVFIEGTLPMGVVRPLTEVEMDHYREPFLNPVDREPLWRFPNELPIAGEPANIVALVEEYMDWLHQSPVPKLLFWGTPGVLIPVAEAARLAKSLPNCKAVDIGPGLNLLQEDNPDLIGSEIARWLSTLEISG

SEQ ID NO: 2548 - protein, 277 aa, Synthetic construct
MFHYVDVGPRDGTPVLFLHGNPTSSYVWRNIIPHVAPTHRCIAPDLIGMGKSDKPDLGYFFDDHVRFMDAFIEALGLEEVVLVIHDWGSALGFHWAKRNPERVKGIAFMEFIRPIPTWDEWPEFARETFQAFRTTDVGRKLIIDQNVFIEGTLPMGVVRPLTEVEMDHYREPFLNPVDREPLWRFPNELPIAGEPANIVALVEEYMDWLHQSPVPKLLFWGTPGVLIPPEEAARLAKSLPNCKAVDIGPGLNLLQEDNPDLIGSEIARWLSTLEISG

SEQ ID NO: 2549 - protein, 277 aa, Synthetic construct
MFHYVDVGPRDGTPVLFLHGNPTSSYVWRNIIPHVAPTHRCIAPDLIGMGKSDKPDLGYFFDDHVRFMDAFIEALGLEEVVLVIHDWGSALGFHWAKRNPERVKGIAFMEFIRPIPTWDEWPEFARETFQAFRTTDVGRKLIIDQNVFIEGTLPMGVVRPLTEVEMDHYREPFLNPVDREPLWRFPNELPIAGEPANIVALVEEYMDWLHQSPVPKLLFWGTPGVLIPPDEAARLAKSLPNCKAVDIGPGLNLLQEDNPDLIGSEIARWLSTLEISG

SEQ ID NO: 2550 - protein, 277 aa, Synthetic construct
MFHYVDVGPRDGTPVLFLHGNPTSSYVWRNIIPHVAPTHRCIAPDLIGMGKSDKPDLGYFFDDHVRFMDAFIEALGLEEVVLVIHDWGSALGFHWAKRNPERVKGIAFMEFIRPIPTWDEWPEFARETFQAFRTTDVGRKLIIDQNVFIEGTLPMGVVRPLTEVEMDHYREPFLNPVDREPLWRFPNELPIAGEPANIVALVEEYMDWLHQSPVPKLLFWGTPGVLIPPSEAARLAKSLPNCKAVDIGPGLNLLQEDNPDLIGSEIARWLSTLEISG

SEQ ID NO: 2551 - protein, 277 aa, Synthetic construct
MFHYVDVGPRDGTPVLFLHGNPTSSYVWRNIIPHVAPTHRCIAPDLIGMGKSDKPDLGYFFDDHVRFMDAFIEALGLEEVVLVIHDWGSALGFHWAKRNPERVKGIAFMEFIRPIPTWDEWPEFARETFQAFRTTDVGRKLIIDQNVFIEGTLPMGVVRPLTEVEMDHYREPFLNPVDREPLWRFPNELPIAGEPANIVALVEEYMDWLHQSPVPKLLFWGTPGVLIPPGEAARLAKSLPNCKAVDIGPGLNLLQEDNPDLIGSEIARWLSTLEISG

SEQ ID NO: 2552 - protein, 277 aa, Synthetic construct
MFHYVDVGPRDGTPVLFLHGNPTSSYVWRNIIPHVAPTHRCIAPDLIGMGKSDKPDLGYFFDDHVRFMDAFIEALGLEEVVLVIHDWGSALGFHWAKRNPERVKGIAFMEFIRPIPTWDEWPEFARETFQAFRTTDVGRKLIIDQNVFIEGTLPMGVVRPLTEVEMDHYREPFLNPVDREPLWRFPNELPIAGEPANIVALVEEYMDWLHQSPVPKLLFWGTPGVLIPPPEAARLAKSLPNCKAVDIGPGLNLLQEDNPDLIGSEIARWLSTLEISG

SEQ ID NO: 2553 - protein, 277 aa, Synthetic construct
MFHYVDVGPRDGTPVLFLHGNPTSSYVWRNIIPHVAPTHRCIAPDLIGMGKSDKPDLGYFFDDHVRFMDAFIEALGLEEVVLVIHDWGSALGFHWAKRNPERVKGIAFMEFIRPIPTWDEWPEFARETFQAFRTTDVGRKLIIDQNVFIEGTLPMGVVRPLTEVEMDHYREPFLNPVDREPLWRFPNELPIAGEPANIVALVEEYMDWLHQSPVPKLLFWGTPGVLIPPKEAARLAKSLPNCKAVDIGPGLNLLQEDNPDLIGSEIARWLSTLEISG

SEQ ID NO: 2554 - protein, 277 aa, Synthetic construct
MFHYVDVGPRDGTPVLFLHGNPTSSYVWRNIIPHVAPTHRCIAPDLIGMGKSDKPDLGYFFDDHVRFMDAFIEALGLEEVVLVIHDWGSALGFHWAKRNPERVKGIAFMEFIRPIPTWDEWPEFARETFQAFRTTDVGRKLIIDQNVFIEGTLPMGVVRPLTEVEMDHYREPFLNPVDREPLWRFPNELPIAGEPANIVALVEEYMDWLHQSPVPKLLFWGTPGVLIPPAAAARLAKSLPNCKAVDIGPGLNLLQEDNPDLIGSEIARWLSTLEISG

SEQ ID NO: 2555 - protein, 277 aa, Synthetic construct
MFHYVDVGPRDGTPVLFLHGNPTSSYVWRNIIPHVAPTHRCIAPDLIGMGKSDKPDLGYFFDDHVRFMDAFIEALGLEEVVLVIHDWGSALGFHWAKRNPERVKGIAFMEFIRPIPTWDEWPEFARETFQAFRTTDVGRKLIIDQNVFIEGTLPMGVVRPLTEVEMDHYREPFLNPVDREPLWRFPNELPIAGEPANIVALVEEYMDWLHQSPVPKLLFWGTPGVLIPPAVAARLAKSLPNCKAVDIGPGLNLLQEDNPDLIGSEIARWLSTLEISG

SEQ ID NO: 2556 - protein, 277 aa, Synthetic construct
MFHYVDVGPRDGTPVLFLHGNPTSSYVWRNIIPHVAPTHRCIAPDLIGMGKSDKPDLGYFFDDHVRFMDAFIEALGLEEVVLVIHDWGSALGFHWAKRNPERVKGIAFMEFIRPIPTWDEWPEFARETFQAFRTTDVGRKLIIDQNVFIEGTLPMGVVRPLTEVEMDHYREPFLNPVDREPLWRFPNELPIAGEPANIVALVEEYMDWLHQSPVPKLLFWGTPGVLIPPALAARLAKSLPNCKAVDIGPGLNLLQEDNPDLIGSEIARWLSTLEISG

SEQ ID NO: 2557 - protein, 277 aa, Synthetic construct
MFHYVDVGPRDGTPVLFLHGNPTSSYVWRNIIPHVAPTHRCIAPDLIGMGKSDKPDLGYFFDDHVRFMDAFIEALGLEEVVLVIHDWGSALGFHWAKRNPERVKGIAFMEFIRPIPTWDEWPEFARETFQAFRTTDVGRKLIIDQNVFIEGTLPMGVVRPLTEVEMDHYREPFLNPVDREPLWRFPNELPIAGEPANIVALVEEYMDWLHQSPVPKLLFWGTPGVLIPPAFAARLAKSLPNCKAVDIGPGLNLLQEDNPDLIGSEIARWLSTLEISG

SEQ ID NO: 2558 - protein, 277 aa, Synthetic construct
MFHYVDVGPRDGTPVLFLHGNPTSSYVWRNIIPHVAPTHRCIAPDLIGMGKSDKPDLGYFFDDHVRFMDAFIEALGLEEVVLVIHDWGSALGFHWAKRNPERVKGIAFMEFIRPIPTWDEWPEFARETFQAFRTTDVGRKLIIDQNVFIEGTLPMGVVRPLTEVEMDHYREPFLNPVDREPLWRFPNELPIAGEPANIVALVEEYMDWLHQSPVPKLLFWGTPGVLIPPAIAARLAKSLPNCKAVDIGPGLNLLQEDNPDLIGSEIARWLSTLEISG

SEQ ID NO: 2559 - protein, 277 aa, Synthetic construct
MFHYVDVGPRDGTPVLFLHGNPTSSYVWRNIIPHVAPTHRCIAPDLIGMGKSDKPDLGYFFDDHVRFMDAFIEALGLEEVVLVIHDWGSALGFHWAKRNPERVKGIAFMEFIRPIPTWDEWPEFARETFQAFRTTDVGRKLIIDQNVFIEGTLPMGVVRPLTEVEMDHYREPFLNPVDREPLWRFPNELPIAGEPANIVALVEEYMDWLHQSPVPKLLFWGTPGVLIPPATAARLAKSLPNCKAVDIGPGLNLLQEDNPDLIGSEIARWLSTLEISG

SEQ ID NO: 2560 - protein, 277 aa, Synthetic construct
MFHYVDVGPRDGTPVLFLHGNPTSSYVWRNIIPHVAPTHRCIAPDLIGMGKSDKPDLGYFFDDHVRFMDAFIEALGLEEVVLVIHDWGSALGFHWAKRNPERVKGIAFMEFIRPIPTWDEWPEFARETFQAFRTTDVGRKLIIDQNVFIEGTLPMGVVRPLTEVEMDHYREPFLNPVDREPLWRFPNELPIAGEPANIVALVEEYMDWLHQSPVPKLLFWGTPGVLIPPAEVARLAKSLPNCKAVDIGPGLNLLQEDNPDLIGSEIARWLSTLEISG

SEQ ID NO: 2561 - protein, 277 aa, Synthetic construct
MFHYVDVGPRDGTPVLFLHGNPTSSYVWRNIIPHVAPTHRCIAPDLIGMGKSDKPDLGYFFDDHVRFMDAFIEALGLEEVVLVIHDWGSALGFHWAKRNPERVKGIAFMEFIRPIPTWDEWPEFARETFQAFRTTDVGRKLIIDQNVFIEGTLPMGVVRPLTEVEMDHYREPFLNPVDREPLWRFPNELPIAGEPANIVALVEEYMDWLHQSPVPKLLFWGTPGVLIPPAEMARLAKSLPNCKAVDIGPGLNLLQEDNPDLIGSEIARWLSTLEISG

SEQ ID NO: 2562 - protein, 277 aa, Synthetic construct
MFHYVDVGPRDGTPVLFLHGNPTSSYVWRNIIPHVAPTHRCIAPDLIGMGKSDKPDLGYFFDDHVRFMDAFIEALGLEEVVLVIHDWGSALGFHWAKRNPERVKGIAFMEFIRPIPTWDEWPEFARETFQAFRTTDVGRKLIIDQNVFIEGTLPMGVVRPLTEVEMDHYREPFLNPVDREPLWRFPNELPIAGEPANIVALVEEYMDWLHQSPVPKLLFWGTPGVLIPPAEGARLAKSLPNCKAVDIGPGLNLLQEDNPDLIGSEIARWLSTLEISG

SEQ ID NO: 2563 - protein, 277 aa, Synthetic construct
MFHYVDVGPRDGTPVLFLHGNPTSSYVWRNIIPHVAPTHRCIAPDLIGMGKSDKPDLGYFFDDHVRFMDAFIEALGLEEVVLVIHDWGSALGFHWAKRNPERVKGIAFMEFIRPIPTWDEWPEFARETFQAFRTTDVGRKLIIDQNVFIEGTLPMGVVRPLTEVEMDHYREPFLNPVDREPLWRFPNELPIAGEPANIVALVEEYMDWLHQSPVPKLLFWGTPGVLIPPAETARLAKSLPNCKAVDIGPGLNLLQEDNPDLIGSEIARWLSTLEISG

SEQ ID NO: 2564 - protein, 277 aa, Synthetic construct
MFHYVDVGPRDGTPVLFLHGNPTSSYVWRNIIPHVAPTHRCIAPDLIGMGKSDKPDLGYFFDDHVRFMDAFIEALGLEEVVLVIHDWGSALGFHWAKRNPERVKGIAFMEFIRPIPTWDEWPEFARETFQAFRTTDVGRKLIIDQNVFIEGTLPMGVVRPLTEVEMDHYREPFLNPVDREPLWRFPNELPIAGEPANIVALVEEYMDWLHQSPVPKLLFWGTPGVLIPPAELARLAKSLPNCKAVDIGPGLNLLQEDNPDLIGSEIARWLSTLEISG

SEQ ID NO: 2565 - protein, 277 aa, Synthetic construct
MFHYVDVGPRDGTPVLFLHGNPTSSYVWRNIIPHVAPTHRCIAPDLIGMGKSDKPDLGYFFDDHVRFMDAFIEALGLEEVVLVIHDWGSALGFHWAKRNPERVKGIAFMEFIRPIPTWDEWPEFARETFQAFRTTDVGRKLIIDQNVFIEGTLPMGVVRPLTEVEMDHYREPFLNPVDREPLWRFPNELPIAGEPANIVALVEEYMDWLHQSPVPKLLFWGTPGVLIPPAERARLAKSLPNCKAVDIGPGLNLLQEDNPDLIGSEIARWLSTLEISG

SEQ ID NO: 2566 - protein, 277 aa, Synthetic construct
MFHYVDVGPRDGTPVLFLHGNPTSSYVWRNIIPHVAPTHRCIAPDLIGMGKSDKPDLGYFFDDHVRFMDAFIEALGLEEVVLVIHDWGSALGFHWAKRNPERVKGIAFMEFIRPIPTWDEWPEFARETFQAFRTTDVGRKLIIDQNVFIEGTLPMGVVRPLTEVEMDHYREPFLNPVDREPLWRFPNELPIAGEPANIVALVEEYMDWLHQSPVPKLLFWGTPGVLIPPAEAERLAKSLPNCKAVDIGPGLNLLQEDNPDLIGSEIARWLSTLEISG

SEQ ID NO: 2567 - protein, 277 aa, Synthetic construct
MFHYVDVGPRDGTPVLFLHGNPTSSYVWRNIIPHVAPTHRCIAPDLIGMGKSDKPDLGYFFDDHVRFMDAFIEALGLEEVVLVIHDWGSALGFHWAKRNPERVKGIAFMEFIRPIPTWDEWPEFARETFQAFRTTDVGRKLIIDQNVFIEGTLPMGVVRPLTEVEMDHYREPFLNPVDREPLWRFPNELPIAGEPANIVALVEEYMDWLHQSPVPKLLFWGTPGVLIPPAEARRLAKSLPNCKAVDIGPGLNLLQEDNPDLIGSEIARWLSTLEISG

SEQ ID NO: 2568 - protein, 277 aa, Synthetic construct
MFHYVDVGPRDGTPVLFLHGNPTSSYVWRNIIPHVAPTHRCIAPDLIGMGKSDKPDLGYFFDDHVRFMDAFIEALGLEEVVLVIHDWGSALGFHWAKRNPERVKGIAFMEFIRPIPTWDEWPEFARETFQAFRTTDVGRKLIIDQNVFIEGTLPMGVVRPLTEVEMDHYREPFLNPVDREPLWRFPNELPIAGEPANIVALVEEYMDWLHQSPVPKLLFWGTPGVLIPPAEADRLAKSLPNCKAVDIGPGLNLLQEDNPDLIGSEIARWLSTLEISG

SEQ ID NO: 2569 - protein, 277 aa, Synthetic construct
MFHYVDVGPRDGTPVLFLHGNPTSSYVWRNIIPHVAPTHRCIAPDLIGMGKSDKPDLGYFFDDHVRFMDAFIEALGLEEVVLVIHDWGSALGFHWAKRNPERVKGIAFMEFIRPIPTWDEWPEFARETFQAFRTTDVGRKLIIDQNVFIEGTLPMGVVRPLTEVEMDHYREPFLNPVDREPLWRFPNELPIAGEPANIVALVEEYMDWLHQSPVPKLLFWGTPGVLIPPAEAQRLAKSLPNCKAVDIGPGLNLLQEDNPDLIGSEIARWLSTLEISG

SEQ ID NO: 2570 - protein, 277 aa, Synthetic construct
MFHYVDVGPRDGTPVLFLHGNPTSSYVWRNIIPHVAPTHRCIAPDLIGMGKSDKPDLGYFFDDHVRFMDAFIEALGLEEVVLVIHDWGSALGFHWAKRNPERVKGIAFMEFIRPIPTWDEWPEFARETFQAFRTTDVGRKLIIDQNVFIEGTLPMGVVRPLTEVEMDHYREPFLNPVDREPLWRFPNELPIAGEPANIVALVEEYMDWLHQSPVPKLLFWGTPGVLIPPAEAKRLAKSLPNCKAVDIGPGLNLLQEDNPDLIGSEIARWLSTLEISG

SEQ ID NO: 2571 - protein, 277 aa, Synthetic construct
MFHYVDVGPRDGTPVLFLHGNPTSSYVWRNIIPHVAPTHRCIAPDLIGMGKSDKPDLGYFFDDHVRFMDAFIEALGLEEVVLVIHDWGSALGFHWAKRNPERVKGIAFMEFIRPIPTWDEWPEFARETFQAFRTTDVGRKLIIDQNVFIEGTLPMGVVRPLTEVEMDHYREPFLNPVDREPLWRFPNELPIAGEPANIVALVEEYMDWLHQSPVPKLLFWGTPGVLIPPAEATRLAKSLPNCKAVDIGPGLNLLQEDNPDLIGSEIARWLSTLEISG

SEQ ID NO: 2572 - protein, 277 aa, Synthetic construct
MFHYVDVGPRDGTPVLFLHGNPTSSYVWRNIIPHVAPTHRCIAPDLIGMGKSDKPDLGYFFDDHVRFMDAFIEALGLEEVVLVIHDWGSALGFHWAKRNPERVKGIAFMEFIRPIPTWDEWPEFARETFQAFRTTDVGRKLIIDQNVFIEGTLPMGVVRPLTEVEMDHYREPFLNPVDREPLWRFPNELPIAGEPANIVALVEEYMDWLHQSPVPKLLFWGTPGVLIPPAEAAWLAKSLPNCKAVDIGPGLNLLQEDNPDLIGSEIARWLSTLEISG

SEQ ID NO: 2573 - protein, 277 aa, Synthetic construct
MFHYVDVGPRDGTPVLFLHGNPTSSYVWRNIIPHVAPTHRCIAPDLIGMGKSDKPDLGYFFDDHVRFMDAFIEALGLEEVVLVIHDWGSALGFHWAKRNPERVKGIAFMEFIRPIPTWDEWPEFARETFQAFRTTDVGRKLIIDQNVFIEGTLPMGVVRPLTEVEMDHYREPFLNPVDREPLWRFPNELPIAGEPANIVALVEEYMDWLHQSPVPKLLFWGTPGVLIPPAEAAALAKSLPNCKAVDIGPGLNLLQEDNPDLIGSEIARWLSTLEISG

SEQ ID NO: 2574 - protein, 277 aa, Synthetic construct
MFHYVDVGPRDGTPVLFLHGNPTSSYVWRNIIPHVAPTHRCIAPDLIGMGKSDKPDLGYFFDDHVRFMDAFIEALGLEEVVLVIHDWGSALGFHWAKRNPERVKGIAFMEFIRPIPTWDEWPEFARETFQAFRTTDVGRKLIIDQNVFIEGTLPMGVVRPLTEVEMDHYREPFLNPVDREPLWRFPNELPIAGEPANIVALVEEYMDWLHQSPVPKLLFWGTPGVLIPPAEAAELAKSLPNCKAVDIGPGLNLLQEDNPDLIGSEIARWLSTLEISG

SEQ ID NO: 2575 - protein, 277 aa, Synthetic construct
MFHYVDVGPRDGTPVLFLHGNPTSSYVWRNIIPHVAPTHRCIAPDLIGMGKSDKPDLGYFFDDHVRFMDAFIEALGLEEVVLVIHDWGSALGFHWAKRNPERVKGIAFMEFIRPIPTWDEWPEFARETFQAFRTTDVGRKLIIDQNVFIEGTLPMGVVRPLTEVEMDHYREPFLNPVDREPLWRFPNELPIAGEPANIVALVEEYMDWLHQSPVPKLLFWGTPGVLIPPAEAADLAKSLPNCKAVDIGPGLNLLQEDNPDLIGSEIARWLSTLEISG

SEQ ID NO: 2576 - protein, 277 aa, Synthetic construct
MFHYVDVGPRDGTPVLFLHGNPTSSYVWRNIIPHVAPTHRCIAPDLIGMGKSDKPDLGYFFDDHVRFMDAFIEALGLEEVVLVIHDWGSALGFHWAKRNPERVKGIAFMEFIRPIPTWDEWPEFARETFQAFRTTDVGRKLIIDQNVFIEGTLPMGVVRPLTEVEMDHYREPFLNPVDREPLWRFPNELPIAGEPANIVALVEEYMDWLHQSPVPKLLFWGTPGVLIPPAEAAYLAKSLPNCKAVDIGPGLNLLQEDNPDLIGSEIARWLSTLEISG

SEQ ID NO: 2577 - protein, 277 aa, Synthetic construct
MFHYVDVGPRDGTPVLFLHGNPTSSYVWRNIIPHVAPTHRCIAPDLIGMGKSDKPDLGYFFDDHVRFMDAFIEALGLEEVVLVIHDWGSALGFHWAKRNPERVKGIAFMEFIRPIPTWDEWPEFARETFQAFRTTDVGRKLIIDQNVFIEGTLPMGVVRPLTEVEMDHYREPFLNPVDREPLWRFPNELPIAGEPANIVALVEEYMDWLHQSPVPKLLFWGTPGVLIPPAEAAFLAKSLPNCKAVDIGPGLNLLQEDNPDLIGSEIARWLSTLEISG

SEQ ID NO: 2578 - protein, 277 aa, Synthetic construct
MFHYVDVGPRDGTPVLFLHGNPTSSYVWRNIIPHVAPTHRCIAPDLIGMGKSDKPDLGYFFDDHVRFMDAFIEALGLEEVVLVIHDWGSALGFHWAKRNPERVKGIAFMEFIRPIPTWDEWPEFARETFQAFRTTDVGRKLIIDQNVFIEGTLPMGVVRPLTEVEMDHYREPFLNPVDREPLWRFPNELPIAGEPANIVALVEEYMDWLHQSPVPKLLFWGTPGVLIPPAEAARFAKSLPNCKAVDIGPGLNLLQEDNPDLIGSEIARWLSTLEISG

SEQ ID NO: 2579 - protein, 277 aa, Synthetic construct
MFHYVDVGPRDGTPVLFLHGNPTSSYVWRNIIPHVAPTHRCIAPDLIGMGKSDKPDLGYFFDDHVRFMDAFIEALGLEEVVLVIHDWGSALGFHWAKRNPERVKGIAFMEFIRPIPTWDEWPEFARETFQAFRTTDVGRKLIIDQNVFIEGTLPMGVVRPLTEVEMDHYREPFLNPVDREPLWRFPNELPIAGEPANIVALVEEYMDWLHQSPVPKLLFWGTPGVLIPPAEAARIAKSLPNCKAVDIGPGLNLLQEDNPDLIGSEIARWLSTLEISG

SEQ ID NO: 2580 - protein, 277 aa, Synthetic construct
MFHYVDVGPRDGTPVLFLHGNPTSSYVWRNIIPHVAPTHRCIAPDLIGMGKSDKPDLGYFFDDHVRFMDAFIEALGLEEVVLVIHDWGSALGFHWAKRNPERVKGIAFMEFIRPIPTWDEWPEFARETFQAFRTTDVGRKLIIDQNVFIEGTLPMGVVRPLTEVEMDHYREPFLNPVDREPLWRFPNELPIAGEPANIVALVEEYMDWLHQSPVPKLLFWGTPGVLIPPAEAARWAKSLPNCKAVDIGPGLNLLQEDNPDLIGSEIARWLSTLEISG

SEQ ID NO: 2581 - protein, 277 aa, Synthetic construct
MFHYVDVGPRDGTPVLFLHGNPTSSYVWRNIIPHVAPTHRCIAPDLIGMGKSDKPDLGYFFDDHVRFMDAFIEALGLEEVVLVIHDWGSALGFHWAKRNPERVKGIAFMEFIRPIPTWDEWPEFARETFQAFRTTDVGRKLIIDQNVFIEGTLPMGVVRPLTEVEMDHYREPFLNPVDREPLWRFPNELPIAGEPANIVALVEEYMDWLHQSPVPKLLFWGTPGVLIPPAEAARYAKSLPNCKAVDIGPGLNLLQEDNPDLIGSEIARWLSTLEISG

SEQ ID NO: 2582 - protein, 277 aa, Synthetic construct
MFHYVDVGPRDGTPVLFLHGNPTSSYVWRNIIPHVAPTHRCIAPDLIGMGKSDKPDLGYFFDDHVRFMDAFIEALGLEEVVLVIHDWGSALGFHWAKRNPERVKGIAFMEFIRPIPTWDEWPEFARETFQAFRTTDVGRKLIIDQNVFIEGTLPMGVVRPLTEVEMDHYREPFLNPVDREPLWRFPNELPIAGEPANIVALVEEYMDWLHQSPVPKLLFWGTPGVLIPPAEAARVAKSLPNCKAVDIGPGLNLLQEDNPDLIGSEIARWLSTLEISG

SEQ ID NO: 2583 - protein, 277 aa, Synthetic construct
MFHYVDVGPRDGTPVLFLHGNPTSSYVWRNIIPHVAPTHRCIAPDLIGMGKSDKPDLGYFFDDHVRFMDAFIEALGLEEVVLVIHDWGSALGFHWAKRNPERVKGIAFMEFIRPIPTWDEWPEFARETFQAFRTTDVGRKLIIDQNVFIEGTLPMGVVRPLTEVEMDHYREPFLNPVDREPLWRFPNELPIAGEPANIVALVEEYMDWLHQSPVPKLLFWGTPGVLIPPAEAARMAKSLPNCKAVDIGPGLNLLQEDNPDLIGSEIARWLSTLEISG

SEQ ID NO: 2584 - protein, 277 aa, Synthetic construct
MFHYVDVGPRDGTPVLFLHGNPTSSYVWRNIIPHVAPTHRCIAPDLIGMGKSDKPDLGYFFDDHVRFMDAFIEALGLEEVVLVIHDWGSALGFHWAKRNPERVKGIAFMEFIRPIPTWDEWPEFARETFQAFRTTDVGRKLIIDQNVFIEGTLPMGVVRPLTEVEMDHYREPFLNPVDREPLWRFPNELPIAGEPANIVALVEEYMDWLHQSPVPKLLFWGTPGVLIPPAEAARLRKSLPNCKAVDIGPGLNLLQEDNPDLIGSEIARWLSTLEISG

SEQ ID NO: 2585 - protein, 277 aa, Synthetic construct
MFHYVDVGPRDGTPVLFLHGNPTSSYVWRNIIPHVAPTHRCIAPDLIGMGKSDKPDLGYFFDDHVRFMDAFIEALGLEEVVLVIHDWGSALGFHWAKRNPERVKGIAFMEFIRPIPTWDEWPEFARETFQAFRTTDVGRKLIIDQNVFIEGTLPMGVVRPLTEVEMDHYREPFLNPVDREPLWRFPNELPIAGEPANIVALVEEYMDWLHQSPVPKLLFWGTPGVLIPPAEAARLVKSLPNCKAVDIGPGLNLLQEDNPDLIGSEIARWLSTLEISG

SEQ ID NO: 2586 - protein, 277 aa, Synthetic construct
MFHYVDVGPRDGTPVLFLHGNPTSSYVWRNIIPHVAPTHRCIAPDLIGMGKSDKPDLGYFFDDHVRFMDAFIEALGLEEVVLVIHDWGSALGFHWAKRNPERVKGIAFMEFIRPIPTWDEWPEFARETFQAFRTTDVGRKLIIDQNVFIEGTLPMGVVRPLTEVEMDHYREPFLNPVDREPLWRFPNELPIAGEPANIVALVEEYMDWLHQSPVPKLLFWGTPGVLIPPAEAARLQKSLPNCKAVDIGPGLNLLQEDNPDLIGSEIARWLSTLEISG

SEQ ID NO: 2587 - protein, 277 aa, Synthetic construct
MFHYVDVGPRDGTPVLFLHGNPTSSYVWRNIIPHVAPTHRCIAPDLIGMGKSDKPDLGYFFDDHVRFMDAFIEALGLEEVVLVIHDWGSALGFHWAKRNPERVKGIAFMEFIRPIPTWDEWPEFARETFQAFRTTDVGRKLIIDQNVFIEGTLPMGVVRPLTEVEMDHYREPFLNPVDREPLWRFPNELPIAGEPANIVALVEEYMDWLHQSPVPKLLFWGTPGVLIPPAEAARLEKSLPNCKAVDIGPGLNLLQEDNPDLIGSEIARWLSTLEISG

SEQ ID NO: 2588 - protein, 277 aa, Synthetic construct
MFHYVDVGPRDGTPVLFLHGNPTSSYVWRNIIPHVAPTHRCIAPDLIGMGKSDKPDLGYFFDDHVRFMDAFIEALGLEEVVLVIHDWGSALGFHWAKRNPERVKGIAFMEFIRPIPTWDEWPEFARETFQAFRTTDVGRKLIIDQNVFIEGTLPMGVVRPLTEVEMDHYREPFLNPVDREPLWRFPNELPIAGEPANIVALVEEYMDWLHQSPVPKLLFWGTPGVLIPPAEAARLKKSLPNCKAVDIGPGLNLLQEDNPDLIGSEIARWLSTLEISG

SEQ ID NO: 2589 - protein, 277 aa, Synthetic construct
MFHYVDVGPRDGTPVLFLHGNPTSSYVWRNIIPHVAPTHRCIAPDLIGMGKSDKPDLGYFFDDHVRFMDAFIEALGLEEVVLVIHDWGSALGFHWAKRNPERVKGIAFMEFIRPIPTWDEWPEFARETFQAFRTTDVGRKLIIDQNVFIEGTLPMGVVRPLTEVEMDHYREPFLNPVDREPLWRFPNELPIAGEPANIVALVEEYMDWLHQSPVPKLLFWGTPGVLIPPAEAARLSKSLPNCKAVDIGPGLNLLQEDNPDLIGSEIARWLSTLEISG

SEQ ID NO: 2590 - protein, 277 aa, Synthetic construct
MFHYVDVGPRDGTPVLFLHGNPTSSYVWRNIIPHVAPTHRCIAPDLIGMGKSDKPDLGYFFDDHVRFMDAFIEALGLEEVVLVIHDWGSALGFHWAKRNPERVKGIAFMEFIRPIPTWDEWPEFARETFQAFRTTDVGRKLIIDQNVFIEGTLPMGVVRPLTEVEMDHYREPFLNPVDREPLWRFPNELPIAGEPANIVALVEEYMDWLHQSPVPKLLFWGTPGVLIPPAEAARLAESLPNCKAVDIGPGLNLLQEDNPDLIGSEIARWLSTLEISG

SEQ ID NO: 2591 - protein, 277 aa, Synthetic construct
MFHYVDVGPRDGTPVLFLHGNPTSSYVWRNIIPHVAPTHRCIAPDLIGMGKSDKPDLGYFFDDHVRFMDAFIEALGLEEVVLVIHDWGSALGFHWAKRNPERVKGIAFMEFIRPIPTWDEWPEFARETFQAFRTTDVGRKLIIDQNVFIEGTLPMGVVRPLTEVEMDHYREPFLNPVDREPLWRFPNELPIAGEPANIVALVEEYMDWLHQSPVPKLLFWGTPGVLIPPAEAARLAASLPNCKAVDIGPGLNLLQEDNPDLIGSEIARWLSTLEISG

SEQ ID NO: 2592 - protein, 277 aa, Synthetic construct
MFHYVDVGPRDGTPVLFLHGNPTSSYVWRNIIPHVAPTHRCIAPDLIGMGKSDKPDLGYFFDDHVRFMDAFIEALGLEEVVLVIHDWGSALGFHWAKRNPERVKGIAFMEFIRPIPTWDEWPEFARETFQAFRTTDVGRKLIIDQNVFIEGTLPMGVVRPLTEVEMDHYREPFLNPVDREPLWRFPNELPIAGEPANIVALVEEYMDWLHQSPVPKLLFWGTPGVLIPPAEAARLADSLPNCKAVDIGPGLNLLQEDNPDLIGSEIARWLSTLEISG

SEQ ID NO: 2593 - protein, 277 aa, Synthetic construct
MFHYVDVGPRDGTPVLFLHGNPTSSYVWRNIIPHVAPTHRCIAPDLIGMGKSDKPDLGYFFDDHVRFMDAFIEALGLEEVVLVIHDWGSALGFHWAKRNPERVKGIAFMEFIRPIPTWDEWPEFARETFQAFRTTDVGRKLIIDQNVFIEGTLPMGVVRPLTEVEMDHYREPFLNPVDREPLWRFPNELPIAGEPANIVALVEEYMDWLHQSPVPKLLFWGTPGVLIPPAEAARLAQSLPNCKAVDIGPGLNLLQEDNPDLIGSEIARWLSTLEISG

SEQ ID NO: 2594 - protein, 277 aa, Synthetic construct
MFHYVDVGPRDGTPVLFLHGNPTSSYVWRNIIPHVAPTHRCIAPDLIGMGKSDKPDLGYFFDDHVRFMDAFIEALGLEEVVLVIHDWGSALGFHWAKRNPERVKGIAFMEFIRPIPTWDEWPEFARETFQAFRTTDVGRKLIIDQNVFIEGTLPMGVVRPLTEVEMDHYREPFLNPVDREPLWRFPNELPIAGEPANIVALVEEYMDWLHQSPVPKLLFWGTPGVLIPPAEAARLARSLPNCKAVDIGPGLNLLQEDNPDLIGSEIARWLSTLEISG

SEQ ID NO: 2595 - protein, 277 aa, Synthetic construct
MFHYVDVGPRDGTPVLFLHGNPTSSYVWRNIIPHVAPTHRCIAPDLIGMGKSDKPDLGYFFDDHVRFMDAFIEALGLEEVVLVIHDWGSALGFHWAKRNPERVKGIAFMEFIRPIPTWDEWPEFARETFQAFRTTDVGRKLIIDQNVFIEGTLPMGVVRPLTEVEMDHYREPFLNPVDREPLWRFPNELPIAGEPANIVALVEEYMDWLHQSPVPKLLFWGTPGVLIPPAEAARLASSLPNCKAVDIGPGLNLLQEDNPDLIGSEIARWLSTLEISG

SEQ ID NO: 2596 - protein, 277 aa, Synthetic construct
MFHYVDVGPRDGTPVLFLHGNPTSSYVWRNIIPHVAPTHRCIAPDLIGMGKSDKPDLGYFFDDHVRFMDAFIEALGLEEVVLVIHDWGSALGFHWAKRNPERVKGIAFMEFIRPIPTWDEWPEFARETFQAFRTTDVGRKLIIDQNVFIEGTLPMGVVRPLTEVEMDHYREPFLNPVDREPLWRFPNELPIAGEPANIVALVEEYMDWLHQSPVPKLLFWGTPGVLIPPAEAARLAKTLPNCKAVDIGPGLNLLQEDNPDLIGSEIARWLSTLEISG

SEQ ID NO: 2597 - protein, 277 aa, Synthetic construct
MFHYVDVGPRDGTPVLFLHGNPTSSYVWRNIIPHVAPTHRCIAPDLIGMGKSDKPDLGYFFDDHVRFMDAFIEALGLEEVVLVIHDWGSALGFHWAKRNPERVKGIAFMEFIRPIPTWDEWPEFARETFQAFRTTDVGRKLIIDQNVFIEGTLPMGVVRPLTEVEMDHYREPFLNPVDREPLWRFPNELPIAGEPANIVALVEEYMDWLHQSPVPKLLFWGTPGVLIPPAEAARLAKDLPNCKAVDIGPGLNLLQEDNPDLIGSEIARWLSTLEISG

SEQ ID NO: 2598 - protein, 277 aa, Synthetic construct
MFHYVDVGPRDGTPVLFLHGNPTSSYVWRNIIPHVAPTHRCIAPDLIGMGKSDKPDLGYFFDDHVRFMDAFIEALGLEEVVLVIHDWGSALGFHWAKRNPERVKGIAFMEFIRPIPTWDEWPEFARETFQAFRTTDVGRKLIIDQNVFIEGTLPMGVVRPLTEVEMDHYREPFLNPVDREPLWRFPNELPIAGEPANIVALVEEYMDWLHQSPVPKLLFWGTPGVLIPPAEAARLAKALPNCKAVDIGPGLNLLQEDNPDLIGSEIARWLSTLEISG

SEQ ID NO: 2599 - protein, 277 aa, Synthetic construct
MFHYVDVGPRDGTPVLFLHGNPTSSYVWRNIIPHVAPTHRCIAPDLIGMGKSDKPDLGYFFDDHVRFMDAFIEALGLEEVVLVIHDWGSALGFHWAKRNPERVKGIAFMEFIRPIPTWDEWPEFARETFQAFRTTDVGRKLIIDQNVFIEGTLPMGVVRPLTEVEMDHYREPFLNPVDREPLWRFPNELPIAGEPANIVALVEEYMDWLHQSPVPKLLFWGTPGVLIPPAEAARLAKELPNCKAVDIGPGLNLLQEDNPDLIGSEIARWLSTLEISG

SEQ ID NO: 2600 - protein, 277 aa, Synthetic construct
MFHYVDVGPRDGTPVLFLHGNPTSSYVWRNIIPHVAPTHRCIAPDLIGMGKSDKPDLGYFFDDHVRFMDAFIEALGLEEVVLVIHDWGSALGFHWAKRNPERVKGIAFMEFIRPIPTWDEWPEFARETFQAFRTTDVGRKLIIDQNVFIEGTLPMGVVRPLTEVEMDHYREPFLNPVDREPLWRFPNELPIAGEPANIVALVEEYMDWLHQSPVPKLLFWGTPGVLIPPAEAARLAKLLPNCKAVDIGPGLNLLQEDNPDLIGSEIARWLSTLEISG

SEQ ID NO: 2601 - protein, 277 aa, Synthetic construct
MFHYVDVGPRDGTPVLFLHGNPTSSYVWRNIIPHVAPTHRCIAPDLIGMGKSDKPDLGYFFDDHVRFMDAFIEALGLEEVVLVIHDWGSALGFHWAKRNPERVKGIAFMEFIRPIPTWDEWPEFARETFQAFRTTDVGRKLIIDQNVFIEGTLPMGVVRPLTEVEMDHYREPFLNPVDREPLWRFPNELPIAGEPANIVALVEEYMDWLHQSPVPKLLFWGTPGVLIPPAEAARLAKVLPNCKAVDIGPGLNLLQEDNPDLIGSEIARWLSTLEISG

SEQ ID NO: 2602 - protein, 277 aa, Synthetic construct
MFHYVDVGPRDGTPVLFLHGNPTSSYVWRNIIPHVAPTHRCIAPDLIGMGKSDKPDLGYFFDDHVRFMDAFIEALGLEEVVLVIHDWGSALGFHWAKRNPERVKGIAFMEFIRPIPTWDEWPEFARETFQAFRTTDVGRKLIIDQNVFIEGTLPMGVVRPLTEVEMDHYREPFLNPVDREPLWRFPNELPIAGEPANIVALVEEYMDWLHQSPVPKLLFWGTPGVLIPPAEAARLAKSIPNCKAVDIGPGLNLLQEDNPDLIGSEIARWLSTLEISG

SEQ ID NO: 2603 - protein, 277 aa, Synthetic construct
MFHYVDVGPRDGTPVLFLHGNPTSSYVWRNIIPHVAPTHRCIAPDLIGMGKSDKPDLGYFFDDHVRFMDAFIEALGLEEVVLVIHDWGSALGFHWAKRNPERVKGIAFMEFIRPIPTWDEWPEFARETFQAFRTTDVGRKLIIDQNVFIEGTLPMGVVRPLTEVEMDHYREPFLNPVDREPLWRFPNELPIAGEPANIVALVEEYMDWLHQSPVPKLLFWGTPGVLIPPAEAARLAKSFPNCKAVDIGPGLNLLQEDNPDLIGSEIARWLSTLEISG

SEQ ID NO: 2604 - protein, 277 aa, Synthetic construct
MFHYVDVGPRDGTPVLFLHGNPTSSYVWRNIIPHVAPTHRCIAPDLIGMGKSDKPDLGYFFDDHVRFMDAFIEALGLEEVVLVIHDWGSALGFHWAKRNPERVKGIAFMEFIRPIPTWDEWPEFARETFQAFRTTDVGRKLIIDQNVFIEGTLPMGVVRPLTEVEMDHYREPFLNPVDREPLWRFPNELPIAGEPANIVALVEEYMDWLHQSPVPKLLFWGTPGVLIPPAEAARLAKSMPNCKAVDIGPGLNLLQEDNPDLIGSEIARWLSTLEISG

SEQ ID NO: 2605 - protein, 277 aa, Synthetic construct
MFHYVDVGPRDGTPVLFLHGNPTSSYVWRNIIPHVAPTHRCIAPDLIGMGKSDKPDLGYFFDDHVRFMDAFIEALGLEEVVLVIHDWGSALGFHWAKRNPERVKGIAFMEFIRPIPTWDEWPEFARETFQAFRTTDVGRKLIIDQNVFIEGTLPMGVVRPLTEVEMDHYREPFLNPVDREPLWRFPNELPIAGEPANIVALVEEYMDWLHQSPVPKLLFWGTPGVLIPPAEAARLAKSWPNCKAVDIGPGLNLLQEDNPDLIGSEIARWLSTLEISG

SEQ ID NO: 2606 - protein, 277 aa, Synthetic construct
MFHYVDVGPRDGTPVLFLHGNPTSSYVWRNIIPHVAPTHRCIAPDLIGMGKSDKPDLGYFFDDHVRFMDAFIEALGLEEVVLVIHDWGSALGFHWAKRNPERVKGIAFMEFIRPIPTWDEWPEFARETFQAFRTTDVGRKLIIDQNVFIEGTLPMGVVRPLTEVEMDHYREPFLNPVDREPLWRFPNELPIAGEPANIVALVEEYMDWLHQSPVPKLLFWGTPGVLIPPAEAARLAKSVPNCKAVDIGPGLNLLQEDNPDLIGSEIARWLSTLEISG

SEQ ID NO: 2607 - protein, 277 aa, Synthetic construct
MFHYVDVGPRDGTPVLFLHGNPTSSYVWRNIIPHVAPTHRCIAPDLIGMGKSDKPDLGYFFDDHVRFMDAFIEALGLEEVVLVIHDWGSALGFHWAKRNPERVKGIAFMEFIRPIPTWDEWPEFARETFQAFRTTDVGRKLIIDQNVFIEGTLPMGVVRPLTEVEMDHYREPFLNPVDREPLWRFPNELPIAGEPANIVALVEEYMDWLHQSPVPKLLFWGTPGVLIPPAEAARLAKSAPNCKAVDIGPGLNLLQEDNPDLIGSEIARWLSTLEISG

SEQ ID NO: 2608 - protein, 277 aa, Synthetic construct
MFHYVDVGPRDGTPVLFLHGNPTSSYVWRNIIPHVAPTHRCIAPDLIGMGKSDKPDLGYFFDDHVRFMDAFIEALGLEEVVLVIHDWGSALGFHWAKRNPERVKGIAFMEFIRPIPTWDEWPEFARETFQAFRTTDVGRKLIIDQNVFIEGTLPMGVVRPLTEVEMDHYREPFLNPVDREPLWRFPNELPIAGEPANIVALVEEYMDWLHQSPVPKLLFWGTPGVLIPPAEAARLAKSLTNCKAVDIGPGLNLLQEDNPDLIGSEIARWLSTLEISG

SEQ ID NO: 2609 - protein, 277 aa, Synthetic construct
MFHYVDVGPRDGTPVLFLHGNPTSSYVWRNIIPHVAPTHRCIAPDLIGMGKSDKPDLGYFFDDHVRFMDAFIEALGLEEVVLVIHDWGSALGFHWAKRNPERVKGIAFMEFIRPIPTWDEWPEFARETFQAFRTTDVGRKLIIDQNVFIEGTLPMGVVRPLTEVEMDHYREPFLNPVDREPLWRFPNELPIAGEPANIVALVEEYMDWLHQSPVPKLLFWGTPGVLIPPAEAARLAKSLANCKAVDIGPGLNLLQEDNPDLIGSEIARWLSTLEISG

SEQ ID NO: 2610 - protein, 277 aa, Synthetic construct
MFHYVDVGPRDGTPVLFLHGNPTSSYVWRNIIPHVAPTHRCIAPDLIGMGKSDKPDLGYFFDDHVRFMDAFIEALGLEEVVLVIHDWGSALGFHWAKRNPERVKGIAFMEFIRPIPTWDEWPEFARETFQAFRTTDVGRKLIIDQNVFIEGTLPMGVVRPLTEVEMDHYREPFLNPVDREPLWRFPNELPIAGEPANIVALVEEYMDWLHQSPVPKLLFWGTPGVLIPPAEAARLAKSLSNCKAVDIGPGLNLLQEDNPDLIGSEIARWLSTLEISG

SEQ ID NO: 2611 - protein, 277 aa, Synthetic construct
MFHYVDVGPRDGTPVLFLHGNPTSSYVWRNIIPHVAPTHRCIAPDLIGMGKSDKPDLGYFFDDHVRFMDAFIEALGLEEVVLVIHDWGSALGFHWAKRNPERVKGIAFMEFIRPIPTWDEWPEFARETFQAFRTTDVGRKLIIDQNVFIEGTLPMGVVRPLTEVEMDHYREPFLNPVDREPLWRFPNELPIAGEPANIVALVEEYMDWLHQSPVPKLLFWGTPGVLIPPAEAARLAKSLKNCKAVDIGPGLNLLQEDNPDLIGSEIARWLSTLEISG

SEQ ID NO: 2612 - protein, 277 aa, Synthetic construct
MFHYVDVGPRDGTPVLFLHGNPTSSYVWRNIIPHVAPTHRCIAPDLIGMGKSDKPDLGYFFDDHVRFMDAFIEALGLEEVVLVIHDWGSALGFHWAKRNPERVKGIAFMEFIRPIPTWDEWPEFARETFQAFRTTDVGRKLIIDQNVFIEGTLPMGVVRPLTEVEMDHYREPFLNPVDREPLWRFPNELPIAGEPANIVALVEEYMDWLHQSPVPKLLFWGTPGVLIPPAEAARLAKSLENCKAVDIGPGLNLLQEDNPDLIGSEIARWLSTLEISG

SEQ ID NO: 2613 - protein, 277 aa, Synthetic construct
MFHYVDVGPRDGTPVLFLHGNPTSSYVWRNIIPHVAPTHRCIAPDLIGMGKSDKPDLGYFFDDHVRFMDAFIEALGLEEVVLVIHDWGSALGFHWAKRNPERVKGIAFMEFIRPIPTWDEWPEFARETFQAFRTTDVGRKLIIDQNVFIEGTLPMGVVRPLTEVEMDHYREPFLNPVDREPLWRFPNELPIAGEPANIVALVEEYMDWLHQSPVPKLLFWGTPGVLIPPAEAARLAKSLDNCKAVDIGPGLNLLQEDNPDLIGSEIARWLSTLEISG

SEQ ID NO: 2614 - protein, 277 aa, Synthetic construct
MFHYVDVGPRDGTPVLFLHGNPTSSYVWRNIIPHVAPTHRCIAPDLIGMGKSDKPDLGYFFDDHVRFMDAFIEALGLEEVVLVIHDWGSALGFHWAKRNPERVKGIAFMEFIRPIPTWDEWPEFARETFQAFRTTDVGRKLIIDQNVFIEGTLPMGVVRPLTEVEMDHYREPFLNPVDREPLWRFPNELPIAGEPANIVALVEEYMDWLHQSPVPKLLFWGTPGVLIPPAEAARLAKSLPDCKAVDIGPGLNLLQEDNPDLIGSEIARWLSTLEISG

SEQ ID NO: 2615 - protein, 277 aa, Synthetic construct
MFHYVDVGPRDGTPVLFLHGNPTSSYVWRNIIPHVAPTHRCIAPDLIGMGKSDKPDLGYFFDDHVRFMDAFIEALGLEEVVLVIHDWGSALGFHWAKRNPERVKGIAFMEFIRPIPTWDEWPEFARETFQAFRTTDVGRKLIIDQNVFIEGTLPMGVVRPLTEVEMDHYREPFLNPVDREPLWRFPNELPIAGEPANIVALVEEYMDWLHQSPVPKLLFWGTPGVLIPPAEAARLAKSLPHCKAVDIGPGLNLLQEDNPDLIGSEIARWLSTLEISG

SEQ ID NO: 2616 - protein, 277 aa, Synthetic construct
MFHYVDVGPRDGTPVLFLHGNPTSSYVWRNIIPHVAPTHRCIAPDLIGMGKSDKPDLGYFFDDHVRFMDAFIEALGLEEVVLVIHDWGSALGFHWAKRNPERVKGIAFMEFIRPIPTWDEWPEFARETFQAFRTTDVGRKLIIDQNVFIEGTLPMGVVRPLTEVEMDHYREPFLNPVDREPLWRFPNELPIAGEPANIVALVEEYMDWLHQSPVPKLLFWGTPGVLIPPAEAARLAKSLPGCKAVDIGPGLNLLQEDNPDLIGSEIARWLSTLEISG

SEQ ID NO: 2617 - protein, 277 aa, Synthetic construct
MFHYVDVGPRDGTPVLFLHGNPTSSYVWRNIIPHVAPTHRCIAPDLIGMGKSDKPDLGYFFDDHVRFMDAFIEALGLEEVVLVIHDWGSALGFHWAKRNPERVKGIAFMEFIRPIPTWDEWPEFARETFQAFRTTDVGRKLIIDQNVFIEGTLPMGVVRPLTEVEMDHYREPFLNPVDREPLWRFPNELPIAGEPANIVALVEEYMDWLHQSPVPKLLFWGTPGVLIPPAEAARLAKSLPACKAVDIGPGLNLLQEDNPDLIGSEIARWLSTLEISG

SEQ ID NO: 2618 - protein, 277 aa, Synthetic construct
MFHYVDVGPRDGTPVLFLHGNPTSSYVWRNIIPHVAPTHRCIAPDLIGMGKSDKPDLGYFFDDHVRFMDAFIEALGLEEVVLVIHDWGSALGFHWAKRNPERVKGIAFMEFIRPIPTWDEWPEFARETFQAFRTTDVGRKLIIDQNVFIEGTLPMGVVRPLTEVEMDHYREPFLNPVDREPLWRFPNELPIAGEPANIVALVEEYMDWLHQSPVPKLLFWGTPGVLIPPAEAARLAKSLPQCKAVDIGPGLNLLQEDNPDLIGSEIARWLSTLEISG

SEQ ID NO: 2619 - protein, 277 aa, Synthetic construct
MFHYVDVGPRDGTPVLFLHGNPTSSYVWRNIIPHVAPTHRCIAPDLIGMGKSDKPDLGYFFDDHVRFMDAFIEALGLEEVVLVIHDWGSALGFHWAKRNPERVKGIAFMEFIRPIPTWDEWPEFARETFQAFRTTDVGRKLIIDQNVFIEGTLPMGVVRPLTEVEMDHYREPFLNPVDREPLWRFPNELPIAGEPANIVALVEEYMDWLHQSPVPKLLFWGTPGVLIPPAEAARLAKSLPSCKAVDIGPGLNLLQEDNPDLIGSEIARWLSTLEISG

SEQ ID NO: 2620 - protein, 277 aa, Synthetic construct
MFHYVDVGPRDGTPVLFLHGNPTSSYVWRNIIPHVAPTHRCIAPDLIGMGKSDKPDLGYFFDDHVRFMDAFIEALGLEEVVLVIHDWGSALGFHWAKRNPERVKGIAFMEFIRPIPTWDEWPEFARETFQAFRTTDVGRKLIIDQNVFIEGTLPMGVVRPLTEVEMDHYREPFLNPVDREPLWRFPNELPIAGEPANIVALVEEYMDWLHQSPVPKLLFWGTPGVLIPPAEAARLAKSLPNLKAVDIGPGLNLLQEDNPDLIGSEIARWLSTLEISG

SEQ ID NO: 2621 - protein, 277 aa, Synthetic construct
MFHYVDVGPRDGTPVLFLHGNPTSSYVWRNIIPHVAPTHRCIAPDLIGMGKSDKPDLGYFFDDHVRFMDAFIEALGLEEVVLVIHDWGSALGFHWAKRNPERVKGIAFMEFIRPIPTWDEWPEFARETFQAFRTTDVGRKLIIDQNVFIEGTLPMGVVRPLTEVEMDHYREPFLNPVDREPLWRFPNELPIAGEPANIVALVEEYMDWLHQSPVPKLLFWGTPGVLIPPAEAARLAKSLPNVKAVDIGPGLNLLQEDNPDLIGSEIARWLSTLEISG

SEQ ID NO: 2622 - protein, 277 aa, Synthetic construct
MFHYVDVGPRDGTPVLFLHGNPTSSYVWRNIIPHVAPTHRCIAPDLIGMGKSDKPDLGYFFDDHVRFMDAFIEALGLEEVVLVIHDWGSALGFHWAKRNPERVKGIAFMEFIRPIPTWDEWPEFARETFQAFRTTDVGRKLIIDQNVFIEGTLPMGVVRPLTEVEMDHYREPFLNPVDREPLWRFPNELPIAGEPANIVALVEEYMDWLHQSPVPKLLFWGTPGVLIPPAEAARLAKSLPNAKAVDIGPGLNLLQEDNPDLIGSEIARWLSTLEISG

SEQ ID NO: 2623 - protein, 277 aa, Synthetic construct
MFHYVDVGPRDGTPVLFLHGNPTSSYVWRNIIPHVAPTHRCIAPDLIGMGKSDKPDLGYFFDDHVRFMDAFIEALGLEEVVLVIHDWGSALGFHWAKRNPERVKGIAFMEFIRPIPTWDEWPEFARETFQAFRTTDVGRKLIIDQNVFIEGTLPMGVVRPLTEVEMDHYREPFLNPVDREPLWRFPNELPIAGEPANIVALVEEYMDWLHQSPVPKLLFWGTPGVLIPPAEAARLAKSLPNIKAVDIGPGLNLLQEDNPDLIGSEIARWLSTLEISG

SEQ ID NO: 2624 - protein, 277 aa, Synthetic construct
MFHYVDVGPRDGTPVLFLHGNPTSSYVWRNIIPHVAPTHRCIAPDLIGMGKSDKPDLGYFFDDHVRFMDAFIEALGLEEVVLVIHDWGSALGFHWAKRNPERVKGIAFMEFIRPIPTWDEWPEFARETFQAFRTTDVGRKLIIDQNVFIEGTLPMGVVRPLTEVEMDHYREPFLNPVDREPLWRFPNELPIAGEPANIVALVEEYMDWLHQSPVPKLLFWGTPGVLIPPAEAARLAKSLPNMKAVDIGPGLNLLQEDNPDLIGSEIARWLSTLEISG

SEQ ID NO: 2625 - protein, 277 aa, Synthetic construct
MFHYVDVGPRDGTPVLFLHGNPTSSYVWRNIIPHVAPTHRCIAPDLIGMGKSDKPDLGYFFDDHVRFMDAFIEALGLEEVVLVIHDWGSALGFHWAKRNPERVKGIAFMEFIRPIPTWDEWPEFARETFQAFRTTDVGRKLIIDQNVFIEGTLPMGVVRPLTEVEMDHYREPFLNPVDREPLWRFPNELPIAGEPANIVALVEEYMDWLHQSPVPKLLFWGTPGVLIPPAEAARLAKSLPNQKAVDIGPGLNLLQEDNPDLIGSEIARWLSTLEISG

SEQ ID NO: 2626 - protein, 277 aa, Synthetic construct
MFHYVDVGPRDGTPVLFLHGNPTSSYVWRNIIPHVAPTHRCIAPDLIGMGKSDKPDLGYFFDDHVRFMDAFIEALGLEEVVLVIHDWGSALGFHWAKRNPERVKGIAFMEFIRPIPTWDEWPEFARETFQAFRTTDVGRKLIIDQNVFIEGTLPMGVVRPLTEVEMDHYREPFLNPVDREPLWRFPNELPIAGEPANIVALVEEYMDWLHQSPVPKLLFWGTPGVLIPPAEAARLAKSLPNCTAVDIGPGLNLLQEDNPDLIGSEIARWLSTLEISG

SEQ ID NO: 2627 - protein, 277 aa, Synthetic construct
MFHYVDVGPRDGTPVLFLHGNPTSSYVWRNIIPHVAPTHRCIAPDLIGMGKSDKPDLGYFFDDHVRFMDAFIEALGLEEVVLVIHDWGSALGFHWAKRNPERVKGIAFMEFIRPIPTWDEWPEFARETFQAFRTTDVGRKLIIDQNVFIEGTLPMGVVRPLTEVEMDHYREPFLNPVDREPLWRFPNELPIAGEPANIVALVEEYMDWLHQSPVPKLLFWGTPGVLIPPAEAARLAKSLPNCEAVDIGPGLNLLQEDNPDLIGSEIARWLSTLEISG

SEQ ID NO: 2628 - protein, 277 aa, Synthetic construct
MFHYVDVGPRDGTPVLFLHGNPTSSYVWRNIIPHVAPTHRCIAPDLIGMGKSDKPDLGYFFDDHVRFMDAFIEALGLEEVVLVIHDWGSALGFHWAKRNPERVKGIAFMEFIRPIPTWDEWPEFARETFQAFRTTDVGRKLIIDQNVFIEGTLPMGVVRPLTEVEMDHYREPFLNPVDREPLWRFPNELPIAGEPANIVALVEEYMDWLHQSPVPKLLFWGTPGVLIPPAEAARLAKSLPNCRAVDIGPGLNLLQEDNPDLIGSEIARWLSTLEISG

SEQ ID NO: 2629 - protein, 277 aa, Synthetic construct
MFHYVDVGPRDGTPVLFLHGNPTSSYVWRNIIPHVAPTHRCIAPDLIGMGKSDKPDLGYFFDDHVRFMDAFIEALGLEEVVLVIHDWGSALGFHWAKRNPERVKGIAFMEFIRPIPTWDEWPEFARETFQAFRTTDVGRKLIIDQNVFIEGTLPMGVVRPLTEVEMDHYREPFLNPVDREPLWRFPNELPIAGEPANIVALVEEYMDWLHQSPVPKLLFWGTPGVLIPPAEAARLAKSLPNCQAVDIGPGLNLLQEDNPDLIGSEIARWLSTLEISG

SEQ ID NO: 2630 - protein, 277 aa, Synthetic construct
MFHYVDVGPRDGTPVLFLHGNPTSSYVWRNIIPHVAPTHRCIAPDLIGMGKSDKPDLGYFFDDHVRFMDAFIEALGLEEVVLVIHDWGSALGFHWAKRNPERVKGIAFMEFIRPIPTWDEWPEFARETFQAFRTTDVGRKLIIDQNVFIEGTLPMGVVRPLTEVEMDHYREPFLNPVDREPLWRFPNELPIAGEPANIVALVEEYMDWLHQSPVPKLLFWGTPGVLIPPAEAARLAKSLPNCSAVDIGPGLNLLQEDNPDLIGSEIARWLSTLEISG

SEQ ID NO: 2631 - protein, 277 aa, Synthetic construct
MFHYVDVGPRDGTPVLFLHGNPTSSYVWRNIIPHVAPTHRCIAPDLIGMGKSDKPDLGYFFDDHVRFMDAFIEALGLEEVVLVIHDWGSALGFHWAKRNPERVKGIAFMEFIRPIPTWDEWPEFARETFQAFRTTDVGRKLIIDQNVFIEGTLPMGVVRPLTEVEMDHYREPFLNPVDREPLWRFPNELPIAGEPANIVALVEEYMDWLHQSPVPKLLFWGTPGVLIPPAEAARLAKSLPNCVAVDIGPGLNLLQEDNPDLIGSEIARWLSTLEISG

SEQ ID NO: 2632 - protein, 277 aa, Synthetic construct
MFHYVDVGPRDGTPVLFLHGNPTSSYVWRNIIPHVAPTHRCIAPDLIGMGKSDKPDLGYFFDDHVRFMDAFIEALGLEEVVLVIHDWGSALGFHWAKRNPERVKGIAFMEFIRPIPTWDEWPEFARETFQAFRTTDVGRKLIIDQNVFIEGTLPMGVVRPLTEVEMDHYREPFLNPVDREPLWRFPNELPIAGEPANIVALVEEYMDWLHQSPVPKLLFWGTPGVLIPPAEAARLAKSLPNCKVVDIGPGLNLLQEDNPDLIGSEIARWLSTLEISG

SEQ ID NO: 2633 - protein, 277 aa, Synthetic construct
MFHYVDVGPRDGTPVLFLHGNPTSSYVWRNIIPHVAPTHRCIAPDLIGMGKSDKPDLGYFFDDHVRFMDAFIEALGLEEVVLVIHDWGSALGFHWAKRNPERVKGIAFMEFIRPIPTWDEWPEFARETFQAFRTTDVGRKLIIDQNVFIEGTLPMGVVRPLTEVEMDHYREPFLNPVDREPLWRFPNELPIAGEPANIVALVEEYMDWLHQSPVPKLLFWGTPGVLIPPAEAARLAKSLPNCKIVDIGPGLNLLQEDNPDLIGSEIARWLSTLEISG

SEQ ID NO: 2634 - protein, 277 aa, Synthetic construct
MFHYVDVGPRDGTPVLFLHGNPTSSYVWRNIIPHVAPTHRCIAPDLIGMGKSDKPDLGYFFDDHVRFMDAFIEALGLEEVVLVIHDWGSALGFHWAKRNPERVKGIAFMEFIRPIPTWDEWPEFARETFQAFRTTDVGRKLIIDQNVFIEGTLPMGVVRPLTEVEMDHYREPFLNPVDREPLWRFPNELPIAGEPANIVALVEEYMDWLHQSPVPKLLFWGTPGVLIPPAEAARLAKSLPNCKLVDIGPGLNLLQEDNPDLIGSEIARWLSTLEISG

SEQ ID NO: 2635 - protein, 277 aa, Synthetic construct
MFHYVDVGPRDGTPVLFLHGNPTSSYVWRNIIPHVAPTHRCIAPDLIGMGKSDKPDLGYFFDDHVRFMDAFIEALGLEEVVLVIHDWGSALGFHWAKRNPERVKGIAFMEFIRPIPTWDEWPEFARETFQAFRTTDVGRKLIIDQNVFIEGTLPMGVVRPLTEVEMDHYREPFLNPVDREPLWRFPNELPIAGEPANIVALVEEYMDWLHQSPVPKLLFWGTPGVLIPPAEAARLAKSLPNCKTVDIGPGLNLLQEDNPDLIGSEIARWLSTLEISG

SEQ ID NO: 2636 - protein, 277 aa, Synthetic construct
MFHYVDVGPRDGTPVLFLHGNPTSSYVWRNIIPHVAPTHRCIAPDLIGMGKSDKPDLGYFFDDHVRFMDAFIEALGLEEVVLVIHDWGSALGFHWAKRNPERVKGIAFMEFIRPIPTWDEWPEFARETFQAFRTTDVGRKLIIDQNVFIEGTLPMGVVRPLTEVEMDHYREPFLNPVDREPLWRFPNELPIAGEPANIVALVEEYMDWLHQSPVPKLLFWGTPGVLIPPAEAARLAKSLPNCKRVDIGPGLNLLQEDNPDLIGSEIARWLSTLEISG

SEQ ID NO: 2637 - protein, 277 aa, Synthetic construct
MFHYVDVGPRDGTPVLFLHGNPTSSYVWRNIIPHVAPTHRCIAPDLIGMGKSDKPDLGYFFDDHVRFMDAFIEALGLEEVVLVIHDWGSALGFHWAKRNPERVKGIAFMEFIRPIPTWDEWPEFARETFQAFRTTDVGRKLIIDQNVFIEGTLPMGVVRPLTEVEMDHYREPFLNPVDREPLWRFPNELPIAGEPANIVALVEEYMDWLHQSPVPKLLFWGTPGVLIPPAEAARLAKSLPNCKSVDIGPGLNLLQEDNPDLIGSEIARWLSTLEISG

SEQ ID NO: 2638 - protein, 277 aa, Synthetic construct
MFHYVDVGPRDGTPVLFLHGNPTSSYVWRNIIPHVAPTHRCIAPDLIGMGKSDKPDLGYFFDDHVRFMDAFIEALGLEEVVLVIHDWGSALGFHWAKRNPERVKGIAFMEFIRPIPTWDEWPEFARETFQAFRTTDVGRKLIIDQNVFIEGTLPMGVVRPLTEVEMDHYREPFLNPVDREPLWRFPNELPIAGEPANIVALVEEYMDWLHQSPVPKLLFWGTPGVLIPPAEAARLAKSLPNCKAIDIGPGLNLLQEDNPDLIGSEIARWLSTLEISG

SEQ ID NO: 2639 - protein, 277 aa, Synthetic construct
MFHYVDVGPRDGTPVLFLHGNPTSSYVWRNIIPHVAPTHRCIAPDLIGMGKSDKPDLGYFFDDHVRFMDAFIEALGLEEVVLVIHDWGSALGFHWAKRNPERVKGIAFMEFIRPIPTWDEWPEFARETFQAFRTTDVGRKLIIDQNVFIEGTLPMGVVRPLTEVEMDHYREPFLNPVDREPLWRFPNELPIAGEPANIVALVEEYMDWLHQSPVPKLLFWGTPGVLIPPAEAARLAKSLPNCKATDIGPGLNLLQEDNPDLIGSEIARWLSTLEISG

SEQ ID NO: 2640 - protein, 277 aa, Synthetic construct
MFHYVDVGPRDGTPVLFLHGNPTSSYVWRNIIPHVAPTHRCIAPDLIGMGKSDKPDLGYFFDDHVRFMDAFIEALGLEEVVLVIHDWGSALGFHWAKRNPERVKGIAFMEFIRPIPTWDEWPEFARETFQAFRTTDVGRKLIIDQNVFIEGTLPMGVVRPLTEVEMDHYREPFLNPVDREPLWRFPNELPIAGEPANIVALVEEYMDWLHQSPVPKLLFWGTPGVLIPPAEAARLAKSLPNCKAADIGPGLNLLQEDNPDLIGSEIARWLSTLEISG

SEQ ID NO: 2641 - protein, 277 aa, Synthetic construct
MFHYVDVGPRDGTPVLFLHGNPTSSYVWRNIIPHVAPTHRCIAPDLIGMGKSDKPDLGYFFDDHVRFMDAFIEALGLEEVVLVIHDWGSALGFHWAKRNPERVKGIAFMEFIRPIPTWDEWPEFARETFQAFRTTDVGRKLIIDQNVFIEGTLPMGVVRPLTEVEMDHYREPFLNPVDREPLWRFPNELPIAGEPANIVALVEEYMDWLHQSPVPKLLFWGTPGVLIPPAEAARLAKSLPNCKARDIGPGLNLLQEDNPDLIGSEIARWLSTLEISG

SEQ ID NO: 2642 - protein, 277 aa, Synthetic construct
MFHYVDVGPRDGTPVLFLHGNPTSSYVWRNIIPHVAPTHRCIAPDLIGMGKSDKPDLGYFFDDHVRFMDAFIEALGLEEVVLVIHDWGSALGFHWAKRNPERVKGIAFMEFIRPIPTWDEWPEFARETFQAFRTTDVGRKLIIDQNVFIEGTLPMGVVRPLTEVEMDHYREPFLNPVDREPLWRFPNELPIAGEPANIVALVEEYMDWLHQSPVPKLLFWGTPGVLIPPAEAARLAKSLPNCKALDIGPGLNLLQEDNPDLIGSEIARWLSTLEISG

SEQ ID NO: 2643 - protein, 277 aa, Synthetic construct
MFHYVDVGPRDGTPVLFLHGNPTSSYVWRNIIPHVAPTHRCIAPDLIGMGKSDKPDLGYFFDDHVRFMDAFIEALGLEEVVLVIHDWGSALGFHWAKRNPERVKGIAFMEFIRPIPTWDEWPEFARETFQAFRTTDVGRKLIIDQNVFIEGTLPMGVVRPLTEVEMDHYREPFLNPVDREPLWRFPNELPIAGEPANIVALVEEYMDWLHQSPVPKLLFWGTPGVLIPPAEAARLAKSLPNCKASDIGPGLNLLQEDNPDLIGSEIARWLSTLEISG

SEQ ID NO: 2644 - protein, 277 aa, Synthetic construct
MFHYVDVGPRDGTPVLFLHGNPTSSYVWRNIIPHVAPTHRCIAPDLIGMGKSDKPDLGYFFDDHVRFMDAFIEALGLEEVVLVIHDWGSALGFHWAKRNPERVKGIAFMEFIRPIPTWDEWPEFARETFQAFRTTDVGRKLIIDQNVFIEGTLPMGVVRPLTEVEMDHYREPFLNPVDREPLWRFPNELPIAGEPANIVALVEEYMDWLHQSPVPKLLFWGTPGVLIPPAEAARLAKSLPNCKAVEIGPGLNLLQEDNPDLIGSEIARWLSTLEISG

SEQ ID NO: 2645 - protein, 277 aa, Synthetic construct
MFHYVDVGPRDGTPVLFLHGNPTSSYVWRNIIPHVAPTHRCIAPDLIGMGKSDKPDLGYFFDDHVRFMDAFIEALGLEEVVLVIHDWGSALGFHWAKRNPERVKGIAFMEFIRPIPTWDEWPEFARETFQAFRTTDVGRKLIIDQNVFIEGTLPMGVVRPLTEVEMDHYREPFLNPVDREPLWRFPNELPIAGEPANIVALVEEYMDWLHQSPVPKLLFWGTPGVLIPPAEAARLAKSLPNCKAVTIGPGLNLLQEDNPDLIGSEIARWLSTLEISG

SEQ ID NO: 2646 - protein, 277 aa, Synthetic construct
MFHYVDVGPRDGTPVLFLHGNPTSSYVWRNIIPHVAPTHRCIAPDLIGMGKSDKPDLGYFFDDHVRFMDAFIEALGLEEVVLVIHDWGSALGFHWAKRNPERVKGIAFMEFIRPIPTWDEWPEFARETFQAFRTTDVGRKLIIDQNVFIEGTLPMGVVRPLTEVEMDHYREPFLNPVDREPLWRFPNELPIAGEPANIVALVEEYMDWLHQSPVPKLLFWGTPGVLIPPAEAARLAKSLPNCKAVPIGPGLNLLQEDNPDLIGSEIARWLSTLEISG

SEQ ID NO: 2647 - protein, 277 aa, Synthetic construct
MFHYVDVGPRDGTPVLFLHGNPTSSYVWRNIIPHVAPTHRCIAPDLIGMGKSDKPDLGYFFDDHVRFMDAFIEALGLEEVVLVIHDWGSALGFHWAKRNPERVKGIAFMEFIRPIPTWDEWPEFARETFQAFRTTDVGRKLIIDQNVFIEGTLPMGVVRPLTEVEMDHYREPFLNPVDREPLWRFPNELPIAGEPANIVALVEEYMDWLHQSPVPKLLFWGTPGVLIPPAEAARLAKSLPNCKAVQIGPGLNLLQEDNPDLIGSEIARWLSTLEISG

SEQ ID NO: 2648 - protein, 277 aa, Synthetic construct
MFHYVDVGPRDGTPVLFLHGNPTSSYVWRNIIPHVAPTHRCIAPDLIGMGKSDKPDLGYFFDDHVRFMDAFIEALGLEEVVLVIHDWGSALGFHWAKRNPERVKGIAFMEFIRPIPTWDEWPEFARETFQAFRTTDVGRKLIIDQNVFIEGTLPMGVVRPLTEVEMDHYREPFLNPVDREPLWRFPNELPIAGEPANIVALVEEYMDWLHQSPVPKLLFWGTPGVLIPPAEAARLAKSLPNCKAVAIGPGLNLLQEDNPDLIGSEIARWLSTLEISG

SEQ ID NO: 2649 - protein, 277 aa, Synthetic construct
MFHYVDVGPRDGTPVLFLHGNPTSSYVWRNIIPHVAPTHRCIAPDLIGMGKSDKPDLGYFFDDHVRFMDAFIEALGLEEVVLVIHDWGSALGFHWAKRNPERVKGIAFMEFIRPIPTWDEWPEFARETFQAFRTTDVGRKLIIDQNVFIEGTLPMGVVRPLTEVEMDHYREPFLNPVDREPLWRFPNELPIAGEPANIVALVEEYMDWLHQSPVPKLLFWGTPGVLIPPAEAARLAKSLPNCKAVSIGPGLNLLQEDNPDLIGSEIARWLSTLEISG

SEQ ID NO: 2650 - protein, 277 aa, Synthetic construct
MFHYVDVGPRDGTPVLFLHGNPTSSYVWRNIIPHVAPTHRCIAPDLIGMGKSDKPDLGYFFDDHVRFMDAFIEALGLEEVVLVIHDWGSALGFHWAKRNPERVKGIAFMEFIRPIPTWDEWPEFARETFQAFRTTDVGRKLIIDQNVFIEGTLPMGVVRPLTEVEMDHYREPFLNPVDREPLWRFPNELPIAGEPANIVALVEEYMDWLHQSPVPKLLFWGTPGVLIPPAEAARLAKSLPNCKAVDVGPGLNLLQEDNPDLIGSEIARWLSTLEISG

SEQ ID NO: 2651 - protein, 277 aa, Synthetic construct
MFHYVDVGPRDGTPVLFLHGNPTSSYVWRNIIPHVAPTHRCIAPDLIGMGKSDKPDLGYFFDDHVRFMDAFIEALGLEEVVLVIHDWGSALGFHWAKRNPERVKGIAFMEFIRPIPTWDEWPEFARETFQAFRTTDVGRKLIIDQNVFIEGTLPMGVVRPLTEVEMDHYREPFLNPVDREPLWRFPNELPIAGEPANIVALVEEYMDWLHQSPVPKLLFWGTPGVLIPPAEAARLAKSLPNCKAVDLGPGLNLLQEDNPDLIGSEIARWLSTLEISG

SEQ ID NO: 2652 - protein, 277 aa, Synthetic construct
MFHYVDVGPRDGTPVLFLHGNPTSSYVWRNIIPHVAPTHRCIAPDLIGMGKSDKPDLGYFFDDHVRFMDAFIEALGLEEVVLVIHDWGSALGFHWAKRNPERVKGIAFMEFIRPIPTWDEWPEFARETFQAFRTTDVGRKLIIDQNVFIEGTLPMGVVRPLTEVEMDHYREPFLNPVDREPLWRFPNELPIAGEPANIVALVEEYMDWLHQSPVPKLLFWGTPGVLIPPAEAARLAKSLPNCKAVDAGPGLNLLQEDNPDLIGSEIARWLSTLEISG

SEQ ID NO: 2653 - protein, 277 aa, Synthetic construct
MFHYVDVGPRDGTPVLFLHGNPTSSYVWRNIIPHVAPTHRCIAPDLIGMGKSDKPDLGYFFDDHVRFMDAFIEALGLEEVVLVIHDWGSALGFHWAKRNPERVKGIAFMEFIRPIPTWDEWPEFARETFQAFRTTDVGRKLIIDQNVFIEGTLPMGVVRPLTEVEMDHYREPFLNPVDREPLWRFPNELPIAGEPANIVALVEEYMDWLHQSPVPKLLFWGTPGVLIPPAEAARLAKSLPNCKAVDCGPGLNLLQEDNPDLIGSEIARWLSTLEISG

SEQ ID NO: 2654 - protein, 277 aa, Synthetic construct
MFHYVDVGPRDGTPVLFLHGNPTSSYVWRNIIPHVAPTHRCIAPDLIGMGKSDKPDLGYFFDDHVRFMDAFIEALGLEEVVLVIHDWGSALGFHWAKRNPERVKGIAFMEFIRPIPTWDEWPEFARETFQAFRTTDVGRKLIIDQNVFIEGTLPMGVVRPLTEVEMDHYREPFLNPVDREPLWRFPNELPIAGEPANIVALVEEYMDWLHQSPVPKLLFWGTPGVLIPPAEAARLAKSLPNCKAVDFGPGLNLLQEDNPDLIGSEIARWLSTLEISG

SEQ ID NO: 2655 - protein, 277 aa, Synthetic construct
MFHYVDVGPRDGTPVLFLHGNPTSSYVWRNIIPHVAPTHRCIAPDLIGMGKSDKPDLGYFFDDHVRFMDAFIEALGLEEVVLVIHDWGSALGFHWAKRNPERVKGIAFMEFIRPIPTWDEWPEFARETFQAFRTTDVGRKLIIDQNVFIEGTLPMGVVRPLTEVEMDHYREPFLNPVDREPLWRFPNELPIAGEPANIVALVEEYMDWLHQSPVPKLLFWGTPGVLIPPAEAARLAKSLPNCKAVDTGPGLNLLQEDNPDLIGSEIARWLSTLEISG

SEQ ID NO: 2656 - protein, 277 aa, Synthetic construct
MFHYVDVGPRDGTPVLFLHGNPTSSYVWRNIIPHVAPTHRCIAPDLIGMGKSDKPDLGYFFDDHVRFMDAFIEALGLEEVVLVIHDWGSALGFHWAKRNPERVKGIAFMEFIRPIPTWDEWPEFARETFQAFRTTDVGRKLIIDQNVFIEGTLPMGVVRPLTEVEMDHYREPFLNPVDREPLWRFPNELPIAGEPANIVALVEEYMDWLHQSPVPKLLFWGTPGVLIPPAEAARLAKSLPNCKAVDIAPGLNLLQEDNPDLIGSEIARWLSTLEISG

SEQ ID NO: 2657 - protein, 277 aa, Synthetic construct
MFHYVDVGPRDGTPVLFLHGNPTSSYVWRNIIPHVAPTHRCIAPDLIGMGKSDKPDLGYFFDDHVRFMDAFIEALGLEEVVLVIHDWGSALGFHWAKRNPERVKGIAFMEFIRPIPTWDEWPEFARETFQAFRTTDVGRKLIIDQNVFIEGTLPMGVVRPLTEVEMDHYREPFLNPVDREPLWRFPNELPIAGEPANIVALVEEYMDWLHQSPVPKLLFWGTPGVLIPPAEAARLAKSLPNCKAVDIEPGLNLLQEDNPDLIGSEIARWLSTLEISG

SEQ ID NO: 2658 - protein, 277 aa, Synthetic construct
MFHYVDVGPRDGTPVLFLHGNPTSSYVWRNIIPHVAPTHRCIAPDLIGMGKSDKPDLGYFFDDHVRFMDAFIEALGLEEVVLVIHDWGSALGFHWAKRNPERVKGIAFMEFIRPIPTWDEWPEFARETFQAFRTTDVGRKLIIDQNVFIEGTLPMGVVRPLTEVEMDHYREPFLNPVDREPLWRFPNELPIAGEPANIVALVEEYMDWLHQSPVPKLLFWGTPGVLIPPAEAARLAKSLPNCKAVDISPGLNLLQEDNPDLIGSEIARWLSTLEISG

SEQ ID NO: 2659 - protein, 277 aa, Synthetic construct
MFHYVDVGPRDGTPVLFLHGNPTSSYVWRNIIPHVAPTHRCIAPDLIGMGKSDKPDLGYFFDDHVRFMDAFIEALGLEEVVLVIHDWGSALGFHWAKRNPERVKGIAFMEFIRPIPTWDEWPEFARETFQAFRTTDVGRKLIIDQNVFIEGTLPMGVVRPLTEVEMDHYREPFLNPVDREPLWRFPNELPIAGEPANIVALVEEYMDWLHQSPVPKLLFWGTPGVLIPPAEAARLAKSLPNCKAVDIPPGLNLLQEDNPDLIGSEIARWLSTLEISG

SEQ ID NO: 2660 - protein, 277 aa, Synthetic construct
MFHYVDVGPRDGTPVLFLHGNPTSSYVWRNIIPHVAPTHRCIAPDLIGMGKSDKPDLGYFFDDHVRFMDAFIEALGLEEVVLVIHDWGSALGFHWAKRNPERVKGIAFMEFIRPIPTWDEWPEFARETFQAFRTTDVGRKLIIDQNVFIEGTLPMGVVRPLTEVEMDHYREPFLNPVDREPLWRFPNELPIAGEPANIVALVEEYMDWLHQSPVPKLLFWGTPGVLIPPAEAARLAKSLPNCKAVDIDPGLNLLQEDNPDLIGSEIARWLSTLEISG

SEQ ID NO: 2661 - protein, 277 aa, Synthetic construct
MFHYVDVGPRDGTPVLFLHGNPTSSYVWRNIIPHVAPTHRCIAPDLIGMGKSDKPDLGYFFDDHVRFMDAFIEALGLEEVVLVIHDWGSALGFHWAKRNPERVKGIAFMEFIRPIPTWDEWPEFARETFQAFRTTDVGRKLIIDQNVFIEGTLPMGVVRPLTEVEMDHYREPFLNPVDREPLWRFPNELPIAGEPANIVALVEEYMDWLHQSPVPKLLFWGTPGVLIPPAEAARLAKSLPNCKAVDITPGLNLLQEDNPDLIGSEIARWLSTLEISG

SEQ ID NO: 2662 - protein, 277 aa, Synthetic construct
MFHYVDVGPRDGTPVLFLHGNPTSSYVWRNIIPHVAPTHRCIAPDLIGMGKSDKPDLGYFFDDHVRFMDAFIEALGLEEVVLVIHDWGSALGFHWAKRNPERVKGIAFMEFIRPIPTWDEWPEFARETFQAFRTTDVGRKLIIDQNVFIEGTLPMGVVRPLTEVEMDHYREPFLNPVDREPLWRFPNELPIAGEPANIVALVEEYMDWLHQSPVPKLLFWGTPGVLIPPAEAARLAKSLPNCKAVDIGEGLNLLQEDNPDLIGSEIARWLSTLEISG

SEQ ID NO: 2663 - protein, 277 aa, Synthetic construct
MFHYVDVGPRDGTPVLFLHGNPTSSYVWRNIIPHVAPTHRCIAPDLIGMGKSDKPDLGYFFDDHVRFMDAFIEALGLEEVVLVIHDWGSALGFHWAKRNPERVKGIAFMEFIRPIPTWDEWPEFARETFQAFRTTDVGRKLIIDQNVFIEGTLPMGVVRPLTEVEMDHYREPFLNPVDREPLWRFPNELPIAGEPANIVALVEEYMDWLHQSPVPKLLFWGTPGVLIPPAEAARLAKSLPNCKAVDIGAGLNLLQEDNPDLIGSEIARWLSTLEISG

SEQ ID NO: 2664 - protein, 277 aa, Synthetic construct
MFHYVDVGPRDGTPVLFLHGNPTSSYVWRNIIPHVAPTHRCIAPDLIGMGKSDKPDLGYFFDDHVRFMDAFIEALGLEEVVLVIHDWGSALGFHWAKRNPERVKGIAFMEFIRPIPTWDEWPEFARETFQAFRTTDVGRKLIIDQNVFIEGTLPMGVVRPLTEVEMDHYREPFLNPVDREPLWRFPNELPIAGEPANIVALVEEYMDWLHQSPVPKLLFWGTPGVLIPPAEAARLAKSLPNCKAVDIGDGLNLLQEDNPDLIGSEIARWLSTLEISG

SEQ ID NO: 2665 - protein, 277 aa, Synthetic construct
MFHYVDVGPRDGTPVLFLHGNPTSSYVWRNIIPHVAPTHRCIAPDLIGMGKSDKPDLGYFFDDHVRFMDAFIEALGLEEVVLVIHDWGSALGFHWAKRNPERVKGIAFMEFIRPIPTWDEWPEFARETFQAFRTTDVGRKLIIDQNVFIEGTLPMGVVRPLTEVEMDHYREPFLNPVDREPLWRFPNELPIAGEPANIVALVEEYMDWLHQSPVPKLLFWGTPGVLIPPAEAARLAKSLPNCKAVDIGSGLNLLQEDNPDLIGSEIARWLSTLEISG

SEQ ID NO: 2666 - protein, 277 aa, Synthetic construct
MFHYVDVGPRDGTPVLFLHGNPTSSYVWRNIIPHVAPTHRCIAPDLIGMGKSDKPDLGYFFDDHVRFMDAFIEALGLEEVVLVIHDWGSALGFHWAKRNPERVKGIAFMEFIRPIPTWDEWPEFARETFQAFRTTDVGRKLIIDQNVFIEGTLPMGVVRPLTEVEMDHYREPFLNPVDREPLWRFPNELPIAGEPANIVALVEEYMDWLHQSPVPKLLFWGTPGVLIPPAEAARLAKSLPNCKAVDIGKGLNLLQEDNPDLIGSEIARWLSTLEISG

SEQ ID NO: 2667 - protein, 277 aa, Synthetic construct
MFHYVDVGPRDGTPVLFLHGNPTSSYVWRNIIPHVAPTHRCIAPDLIGMGKSDKPDLGYFFDDHVRFMDAFIEALGLEEVVLVIHDWGSALGFHWAKRNPERVKGIAFMEFIRPIPTWDEWPEFARETFQAFRTTDVGRKLIIDQNVFIEGTLPMGVVRPLTEVEMDHYREPFLNPVDREPLWRFPNELPIAGEPANIVALVEEYMDWLHQSPVPKLLFWGTPGVLIPPAEAARLAKSLPNCKAVDIGTGLNLLQEDNPDLIGSEIARWLSTLEISG

SEQ ID NO: 2668 - protein, 277 aa, Synthetic construct
MFHYVDVGPRDGTPVLFLHGNPTSSYVWRNIIPHVAPTHRCIAPDLIGMGKSDKPDLGYFFDDHVRFMDAFIEALGLEEVVLVIHDWGSALGFHWAKRNPERVKGIAFMEFIRPIPTWDEWPEFARETFQAFRTTDVGRKLIIDQNVFIEGTLPMGVVRPLTEVEMDHYREPFLNPVDREPLWRFPNELPIAGEPANIVALVEEYMDWLHQSPVPKLLFWGTPGVLIPPAEAARLAKSLPNCKAVDIGPALNLLQEDNPDLIGSEIARWLSTLEISG

SEQ ID NO: 2669 - protein, 277 aa, Synthetic construct
MFHYVDVGPRDGTPVLFLHGNPTSSYVWRNIIPHVAPTHRCIAPDLIGMGKSDKPDLGYFFDDHVRFMDAFIEALGLEEVVLVIHDWGSALGFHWAKRNPERVKGIAFMEFIRPIPTWDEWPEFARETFQAFRTTDVGRKLIIDQNVFIEGTLPMGVVRPLTEVEMDHYREPFLNPVDREPLWRFPNELPIAGEPANIVALVEEYMDWLHQSPVPKLLFWGTPGVLIPPAEAARLAKSLPNCKAVDIGPSLNLLQEDNPDLIGSEIARWLSTLEISG

SEQ ID NO: 2670 - protein, 277 aa, Synthetic construct
MFHYVDVGPRDGTPVLFLHGNPTSSYVWRNIIPHVAPTHRCIAPDLIGMGKSDKPDLGYFFDDHVRFMDAFIEALGLEEVVLVIHDWGSALGFHWAKRNPERVKGIAFMEFIRPIPTWDEWPEFARETFQAFRTTDVGRKLIIDQNVFIEGTLPMGVVRPLTEVEMDHYREPFLNPVDREPLWRFPNELPIAGEPANIVALVEEYMDWLHQSPVPKLLFWGTPGVLIPPAEAARLAKSLPNCKAVDIGPTLNLLQEDNPDLIGSEIARWLSTLEISG

SEQ ID NO: 2671 - protein, 277 aa, Synthetic construct
MFHYVDVGPRDGTPVLFLHGNPTSSYVWRNIIPHVAPTHRCIAPDLIGMGKSDKPDLGYFFDDHVRFMDAFIEALGLEEVVLVIHDWGSALGFHWAKRNPERVKGIAFMEFIRPIPTWDEWPEFARETFQAFRTTDVGRKLIIDQNVFIEGTLPMGVVRPLTEVEMDHYREPFLNPVDREPLWRFPNELPIAGEPANIVALVEEYMDWLHQSPVPKLLFWGTPGVLIPPAEAARLAKSLPNCKAVDIGPVLNLLQEDNPDLIGSEIARWLSTLEISG

SEQ ID NO: 2672 - protein, 277 aa, Synthetic construct
MFHYVDVGPRDGTPVLFLHGNPTSSYVWRNIIPHVAPTHRCIAPDLIGMGKSDKPDLGYFFDDHVRFMDAFIEALGLEEVVLVIHDWGSALGFHWAKRNPERVKGIAFMEFIRPIPTWDEWPEFARETFQAFRTTDVGRKLIIDQNVFIEGTLPMGVVRPLTEVEMDHYREPFLNPVDREPLWRFPNELPIAGEPANIVALVEEYMDWLHQSPVPKLLFWGTPGVLIPPAEAARLAKSLPNCKAVDIGPCLNLLQEDNPDLIGSEIARWLSTLEISG

SEQ ID NO: 2673 - protein, 277 aa, Synthetic construct
MFHYVDVGPRDGTPVLFLHGNPTSSYVWRNIIPHVAPTHRCIAPDLIGMGKSDKPDLGYFFDDHVRFMDAFIEALGLEEVVLVIHDWGSALGFHWAKRNPERVKGIAFMEFIRPIPTWDEWPEFARETFQAFRTTDVGRKLIIDQNVFIEGTLPMGVVRPLTEVEMDHYREPFLNPVDREPLWRFPNELPIAGEPANIVALVEEYMDWLHQSPVPKLLFWGTPGVLIPPAEAARLAKSLPNCKAVDIGPNLNLLQEDNPDLIGSEIARWLSTLEISG

SEQ ID NO: 2674 - protein, 277 aa, Synthetic construct
MFHYVDVGPRDGTPVLFLHGNPTSSYVWRNIIPHVAPTHRCIAPDLIGMGKSDKPDLGYFFDDHVRFMDAFIEALGLEEVVLVIHDWGSALGFHWAKRNPERVKGIAFMEFIRPIPTWDEWPEFARETFQAFRTTDVGRKLIIDQNVFIEGTLPMGVVRPLTEVEMDHYREPFLNPVDREPLWRFPNELPIAGEPANIVALVEEYMDWLHQSPVPKLLFWGTPGVLIPPAEAARLAKSLPNCKAVDIGPGINLLQEDNPDLIGSEIARWLSTLEISG

SEQ ID NO: 2675 - protein, 277 aa, Synthetic construct
MFHYVDVGPRDGTPVLFLHGNPTSSYVWRNIIPHVAPTHRCIAPDLIGMGKSDKPDLGYFFDDHVRFMDAFIEALGLEEVVLVIHDWGSALGFHWAKRNPERVKGIAFMEFIRPIPTWDEWPEFARETFQAFRTTDVGRKLIIDQNVFIEGTLPMGVVRPLTEVEMDHYREPFLNPVDREPLWRFPNELPIAGEPANIVALVEEYMDWLHQSPVPKLLFWGTPGVLIPPAEAARLAKSLPNCKAVDIGPGVNLLQEDNPDLIGSEIARWLSTLEISG

SEQ ID NO: 2676 - protein, 277 aa, Synthetic construct
MFHYVDVGPRDGTPVLFLHGNPTSSYVWRNIIPHVAPTHRCIAPDLIGMGKSDKPDLGYFFDDHVRFMDAFIEALGLEEVVLVIHDWGSALGFHWAKRNPERVKGIAFMEFIRPIPTWDEWPEFARETFQAFRTTDVGRKLIIDQNVFIEGTLPMGVVRPLTEVEMDHYREPFLNPVDREPLWRFPNELPIAGEPANIVALVEEYMDWLHQSPVPKLLFWGTPGVLIPPAEAARLAKSLPNCKAVDIGPGRNLLQEDNPDLIGSEIARWLSTLEISG

SEQ ID NO: 2677 - protein, 277 aa, Synthetic construct
MFHYVDVGPRDGTPVLFLHGNPTSSYVWRNIIPHVAPTHRCIAPDLIGMGKSDKPDLGYFFDDHVRFMDAFIEALGLEEVVLVIHDWGSALGFHWAKRNPERVKGIAFMEFIRPIPTWDEWPEFARETFQAFRTTDVGRKLIIDQNVFIEGTLPMGVVRPLTEVEMDHYREPFLNPVDREPLWRFPNELPIAGEPANIVALVEEYMDWLHQSPVPKLLFWGTPGVLIPPAEAARLAKSLPNCKAVDIGPGKNLLQEDNPDLIGSEIARWLSTLEISG

SEQ ID NO: 2678 - protein, 277 aa, Synthetic construct
MFHYVDVGPRDGTPVLFLHGNPTSSYVWRNIIPHVAPTHRCIAPDLIGMGKSDKPDLGYFFDDHVRFMDAFIEALGLEEVVLVIHDWGSALGFHWAKRNPERVKGIAFMEFIRPIPTWDEWPEFARETFQAFRTTDVGRKLIIDQNVFIEGTLPMGVVRPLTEVEMDHYREPFLNPVDREPLWRFPNELPIAGEPANIVALVEEYMDWLHQSPVPKLLFWGTPGVLIPPAEAARLAKSLPNCKAVDIGPGANLLQEDNPDLIGSEIARWLSTLEISG

SEQ ID NO: 2679 - protein, 277 aa, Synthetic construct
MFHYVDVGPRDGTPVLFLHGNPTSSYVWRNIIPHVAPTHRCIAPDLIGMGKSDKPDLGYFFDDHVRFMDAFIEALGLEEVVLVIHDWGSALGFHWAKRNPERVKGIAFMEFIRPIPTWDEWPEFARETFQAFRTTDVGRKLIIDQNVFIEGTLPMGVVRPLTEVEMDHYREPFLNPVDREPLWRFPNELPIAGEPANIVALVEEYMDWLHQSPVPKLLFWGTPGVLIPPAEAARLAKSLPNCKAVDIGPGLHLLQEDNPDLIGSEIARWLSTLEISG

SEQ ID NO: 2680 - protein, 277 aa, Synthetic construct
MFHYVDVGPRDGTPVLFLHGNPTSSYVWRNIIPHVAPTHRCIAPDLIGMGKSDKPDLGYFFDDHVRFMDAFIEALGLEEVVLVIHDWGSALGFHWAKRNPERVKGIAFMEFIRPIPTWDEWPEFARETFQAFRTTDVGRKLIIDQNVFIEGTLPMGVVRPLTEVEMDHYREPFLNPVDREPLWRFPNELPIAGEPANIVALVEEYMDWLHQSPVPKLLFWGTPGVLIPPAEAARLAKSLPNCKAVDIGPGLYLLQEDNPDLIGSEIARWLSTLEISG

SEQ ID NO: 2681 - protein, 277 aa, Synthetic construct
MFHYVDVGPRDGTPVLFLHGNPTSSYVWRNIIPHVAPTHRCIAPDLIGMGKSDKPDLGYFFDDHVRFMDAFIEALGLEEVVLVIHDWGSALGFHWAKRNPERVKGIAFMEFIRPIPTWDEWPEFARETFQAFRTTDVGRKLIIDQNVFIEGTLPMGVVRPLTEVEMDHYREPFLNPVDREPLWRFPNELPIAGEPANIVALVEEYMDWLHQSPVPKLLFWGTPGVLIPPAEAARLAKSLPNCKAVDIGPGLQLLQEDNPDLIGSEIARWLSTLEISG

SEQ ID NO: 2682 - protein, 277 aa, Synthetic construct
MFHYVDVGPRDGTPVLFLHGNPTSSYVWRNIIPHVAPTHRCIAPDLIGMGKSDKPDLGYFFDDHVRFMDAFIEALGLEEVVLVIHDWGSALGFHWAKRNPERVKGIAFMEFIRPIPTWDEWPEFARETFQAFRTTDVGRKLIIDQNVFIEGTLPMGVVRPLTEVEMDHYREPFLNPVDREPLWRFPNELPIAGEPANIVALVEEYMDWLHQSPVPKLLFWGTPGVLIPPAEAARLAKSLPNCKAVDIGPGLLLLQEDNPDLIGSEIARWLSTLEISG

SEQ ID NO: 2683 - protein, 277 aa, Synthetic construct
MFHYVDVGPRDGTPVLFLHGNPTSSYVWRNIIPHVAPTHRCIAPDLIGMGKSDKPDLGYFFDDHVRFMDAFIEALGLEEVVLVIHDWGSALGFHWAKRNPERVKGIAFMEFIRPIPTWDEWPEFARETFQAFRTTDVGRKLIIDQNVFIEGTLPMGVVRPLTEVEMDHYREPFLNPVDREPLWRFPNELPIAGEPANIVALVEEYMDWLHQSPVPKLLFWGTPGVLIPPAEAARLAKSLPNCKAVDIGPGLFLLQEDNPDLIGSEIARWLSTLEISG

SEQ ID NO: 2684 - protein, 277 aa, Synthetic construct
MFHYVDVGPRDGTPVLFLHGNPTSSYVWRNIIPHVAPTHRCIAPDLIGMGKSDKPDLGYFFDDHVRFMDAFIEALGLEEVVLVIHDWGSALGFHWAKRNPERVKGIAFMEFIRPIPTWDEWPEFARETFQAFRTTDVGRKLIIDQNVFIEGTLPMGVVRPLTEVEMDHYREPFLNPVDREPLWRFPNELPIAGEPANIVALVEEYMDWLHQSPVPKLLFWGTPGVLIPPAEAARLAKSLPNCKAVDIGPGLSLLQEDNPDLIGSEIARWLSTLEISG

SEQ ID NO: 2685 - protein, 277 aa, Synthetic construct
MFHYVDVGPRDGTPVLFLHGNPTSSYVWRNIIPHVAPTHRCIAPDLIGMGKSDKPDLGYFFDDHVRFMDAFIEALGLEEVVLVIHDWGSALGFHWAKRNPERVKGIAFMEFIRPIPTWDEWPEFARETFQAFRTTDVGRKLIIDQNVFIEGTLPMGVVRPLTEVEMDHYREPFLNPVDREPLWRFPNELPIAGEPANIVALVEEYMDWLHQSPVPKLLFWGTPGVLIPPAEAARLAKSLPNCKAVDIGPGLNFLQEDNPDLIGSEIARWLSTLEISG

SEQ ID NO: 2686 - protein, 277 aa, Synthetic construct
MFHYVDVGPRDGTPVLFLHGNPTSSYVWRNIIPHVAPTHRCIAPDLIGMGKSDKPDLGYFFDDHVRFMDAFIEALGLEEVVLVIHDWGSALGFHWAKRNPERVKGIAFMEFIRPIPTWDEWPEFARETFQAFRTTDVGRKLIIDQNVFIEGTLPMGVVRPLTEVEMDHYREPFLNPVDREPLWRFPNELPIAGEPANIVALVEEYMDWLHQSPVPKLLFWGTPGVLIPPAEAARLAKSLPNCKAVDIGPGLNYLQEDNPDLIGSEIARWLSTLEISG

SEQ ID NO: 2687 - protein, 277 aa, Synthetic construct
MFHYVDVGPRDGTPVLFLHGNPTSSYVWRNIIPHVAPTHRCIAPDLIGMGKSDKPDLGYFFDDHVRFMDAFIEALGLEEVVLVIHDWGSALGFHWAKRNPERVKGIAFMEFIRPIPTWDEWPEFARETFQAFRTTDVGRKLIIDQNVFIEGTLPMGVVRPLTEVEMDHYREPFLNPVDREPLWRFPNELPIAGEPANIVALVEEYMDWLHQSPVPKLLFWGTPGVLIPPAEAARLAKSLPNCKAVDIGPGLNHLQEDNPDLIGSEIARWLSTLEISG

SEQ ID NO: 2688 - protein, 277 aa, Synthetic construct
MFHYVDVGPRDGTPVLFLHGNPTSSYVWRNIIPHVAPTHRCIAPDLIGMGKSDKPDLGYFFDDHVRFMDAFIEALGLEEVVLVIHDWGSALGFHWAKRNPERVKGIAFMEFIRPIPTWDEWPEFARETFQAFRTTDVGRKLIIDQNVFIEGTLPMGVVRPLTEVEMDHYREPFLNPVDREPLWRFPNELPIAGEPANIVALVEEYMDWLHQSPVPKLLFWGTPGVLIPPAEAARLAKSLPNCKAVDIGPGLNWLQEDNPDLIGSEIARWLSTLEISG

SEQ ID NO: 2689 - protein, 277 aa, Synthetic construct
MFHYVDVGPRDGTPVLFLHGNPTSSYVWRNIIPHVAPTHRCIAPDLIGMGKSDKPDLGYFFDDHVRFMDAFIEALGLEEVVLVIHDWGSALGFHWAKRNPERVKGIAFMEFIRPIPTWDEWPEFARETFQAFRTTDVGRKLIIDQNVFIEGTLPMGVVRPLTEVEMDHYREPFLNPVDREPLWRFPNELPIAGEPANIVALVEEYMDWLHQSPVPKLLFWGTPGVLIPPAEAARLAKSLPNCKAVDIGPGLNMLQEDNPDLIGSEIARWLSTLEISG

SEQ ID NO: 2690 - protein, 277 aa, Synthetic construct
MFHYVDVGPRDGTPVLFLHGNPTSSYVWRNIIPHVAPTHRCIAPDLIGMGKSDKPDLGYFFDDHVRFMDAFIEALGLEEVVLVIHDWGSALGFHWAKRNPERVKGIAFMEFIRPIPTWDEWPEFARETFQAFRTTDVGRKLIIDQNVFIEGTLPMGVVRPLTEVEMDHYREPFLNPVDREPLWRFPNELPIAGEPANIVALVEEYMDWLHQSPVPKLLFWGTPGVLIPPAEAARLAKSLPNCKAVDIGPGLNILQEDNPDLIGSEIARWLSTLEISG

SEQ ID NO: 2691 - protein, 277 aa, Synthetic construct
MFHYVDVGPRDGTPVLFLHGNPTSSYVWRNIIPHVAPTHRCIAPDLIGMGKSDKPDLGYFFDDHVRFMDAFIEALGLEEVVLVIHDWGSALGFHWAKRNPERVKGIAFMEFIRPIPTWDEWPEFARETFQAFRTTDVGRKLIIDQNVFIEGTLPMGVVRPLTEVEMDHYREPFLNPVDREPLWRFPNELPIAGEPANIVALVEEYMDWLHQSPVPKLLFWGTPGVLIPPAEAARLAKSLPNCKAVDIGPGLNLVQEDNPDLIGSEIARWLSTLEISG

SEQ ID NO: 2692 - protein, 277 aa, Synthetic construct
MFHYVDVGPRDGTPVLFLHGNPTSSYVWRNIIPHVAPTHRCIAPDLIGMGKSDKPDLGYFFDDHVRFMDAFIEALGLEEVVLVIHDWGSALGFHWAKRNPERVKGIAFMEFIRPIPTWDEWPEFARETFQAFRTTDVGRKLIIDQNVFIEGTLPMGVVRPLTEVEMDHYREPFLNPVDREPLWRFPNELPIAGEPANIVALVEEYMDWLHQSPVPKLLFWGTPGVLIPPAEAARLAKSLPNCKAVDIGPGLNLIQEDNPDLIGSEIARWLSTLEISG

SEQ ID NO: 2693 - protein, 277 aa, Synthetic construct
MFHYVDVGPRDGTPVLFLHGNPTSSYVWRNIIPHVAPTHRCIAPDLIGMGKSDKPDLGYFFDDHVRFMDAFIEALGLEEVVLVIHDWGSALGFHWAKRNPERVKGIAFMEFIRPIPTWDEWPEFARETFQAFRTTDVGRKLIIDQNVFIEGTLPMGVVRPLTEVEMDHYREPFLNPVDREPLWRFPNELPIAGEPANIVALVEEYMDWLHQSPVPKLLFWGTPGVLIPPAEAARLAKSLPNCKAVDIGPGLNLAQEDNPDLIGSEIARWLSTLEISG

SEQ ID NO: 2694 - protein, 277 aa, Synthetic construct
MFHYVDVGPRDGTPVLFLHGNPTSSYVWRNIIPHVAPTHRCIAPDLIGMGKSDKPDLGYFFDDHVRFMDAFIEALGLEEVVLVIHDWGSALGFHWAKRNPERVKGIAFMEFIRPIPTWDEWPEFARETFQAFRTTDVGRKLIIDQNVFIEGTLPMGVVRPLTEVEMDHYREPFLNPVDREPLWRFPNELPIAGEPANIVALVEEYMDWLHQSPVPKLLFWGTPGVLIPPAEAARLAKSLPNCKAVDIGPGLNLMQEDNPDLIGSEIARWLSTLEISG

SEQ ID NO: 2695 - protein, 277 aa, Synthetic construct
MFHYVDVGPRDGTPVLFLHGNPTSSYVWRNIIPHVAPTHRCIAPDLIGMGKSDKPDLGYFFDDHVRFMDAFIEALGLEEVVLVIHDWGSALGFHWAKRNPERVKGIAFMEFIRPIPTWDEWPEFARETFQAFRTTDVGRKLIIDQNVFIEGTLPMGVVRPLTEVEMDHYREPFLNPVDREPLWRFPNELPIAGEPANIVALVEEYMDWLHQSPVPKLLFWGTPGVLIPPAEAARLAKSLPNCKAVDIGPGLNLTQEDNPDLIGSEIARWLSTLEISG

SEQ ID NO: 2696 - protein, 277 aa, Synthetic construct
MFHYVDVGPRDGTPVLFLHGNPTSSYVWRNIIPHVAPTHRCIAPDLIGMGKSDKPDLGYFFDDHVRFMDAFIEALGLEEVVLVIHDWGSALGFHWAKRNPERVKGIAFMEFIRPIPTWDEWPEFARETFQAFRTTDVGRKLIIDQNVFIEGTLPMGVVRPLTEVEMDHYREPFLNPVDREPLWRFPNELPIAGEPANIVALVEEYMDWLHQSPVPKLLFWGTPGVLIPPAEAARLAKSLPNCKAVDIGPGLNLPQEDNPDLIGSEIARWLSTLEISG

SEQ ID NO: 2697 - protein, 277 aa, Synthetic construct
MFHYVDVGPRDGTPVLFLHGNPTSSYVWRNIIPHVAPTHRCIAPDLIGMGKSDKPDLGYFFDDHVRFMDAFIEALGLEEVVLVIHDWGSALGFHWAKRNPERVKGIAFMEFIRPIPTWDEWPEFARETFQAFRTTDVGRKLIIDQNVFIEGTLPMGVVRPLTEVEMDHYREPFLNPVDREPLWRFPNELPIAGEPANIVALVEEYMDWLHQSPVPKLLFWGTPGVLIPPAEAARLAKSLPNCKAVDIGPGLNLLPEDNPDLIGSEIARWLSTLEISG

SEQ ID NO: 2698 - protein, 277 aa, Synthetic construct
MFHYVDVGPRDGTPVLFLHGNPTSSYVWRNIIPHVAPTHRCIAPDLIGMGKSDKPDLGYFFDDHVRFMDAFIEALGLEEVVLVIHDWGSALGFHWAKRNPERVKGIAFMEFIRPIPTWDEWPEFARETFQAFRTTDVGRKLIIDQNVFIEGTLPMGVVRPLTEVEMDHYREPFLNPVDREPLWRFPNELPIAGEPANIVALVEEYMDWLHQSPVPKLLFWGTPGVLIPPAEAARLAKSLPNCKAVDIGPGLNLLHEDNPDLIGSEIARWLSTLEISG

SEQ ID NO: 2699 - protein, 277 aa, Synthetic construct
MFHYVDVGPRDGTPVLFLHGNPTSSYVWRNIIPHVAPTHRCIAPDLIGMGKSDKPDLGYFFDDHVRFMDAFIEALGLEEVVLVIHDWGSALGFHWAKRNPERVKGIAFMEFIRPIPTWDEWPEFARETFQAFRTTDVGRKLIIDQNVFIEGTLPMGVVRPLTEVEMDHYREPFLNPVDREPLWRFPNELPIAGEPANIVALVEEYMDWLHQSPVPKLLFWGTPGVLIPPAEAARLAKSLPNCKAVDIGPGLNLLAEDNPDLIGSEIARWLSTLEISG

SEQ ID NO: 2700 - protein, 277 aa, Synthetic construct
MFHYVDVGPRDGTPVLFLHGNPTSSYVWRNIIPHVAPTHRCIAPDLIGMGKSDKPDLGYFFDDHVRFMDAFIEALGLEEVVLVIHDWGSALGFHWAKRNPERVKGIAFMEFIRPIPTWDEWPEFARETFQAFRTTDVGRKLIIDQNVFIEGTLPMGVVRPLTEVEMDHYREPFLNPVDREPLWRFPNELPIAGEPANIVALVEEYMDWLHQSPVPKLLFWGTPGVLIPPAEAARLAKSLPNCKAVDIGPGLNLLTEDNPDLIGSEIARWLSTLEISG

SEQ ID NO: 2701 - protein, 277 aa, Synthetic construct
MFHYVDVGPRDGTPVLFLHGNPTSSYVWRNIIPHVAPTHRCIAPDLIGMGKSDKPDLGYFFDDHVRFMDAFIEALGLEEVVLVIHDWGSALGFHWAKRNPERVKGIAFMEFIRPIPTWDEWPEFARETFQAFRTTDVGRKLIIDQNVFIEGTLPMGVVRPLTEVEMDHYREPFLNPVDREPLWRFPNELPIAGEPANIVALVEEYMDWLHQSPVPKLLFWGTPGVLIPPAEAARLAKSLPNCKAVDIGPGLNLLLEDNPDLIGSEIARWLSTLEISG

SEQ ID NO: 2702 - protein, 277 aa, Synthetic construct
MFHYVDVGPRDGTPVLFLHGNPTSSYVWRNIIPHVAPTHRCIAPDLIGMGKSDKPDLGYFFDDHVRFMDAFIEALGLEEVVLVIHDWGSALGFHWAKRNPERVKGIAFMEFIRPIPTWDEWPEFARETFQAFRTTDVGRKLIIDQNVFIEGTLPMGVVRPLTEVEMDHYREPFLNPVDREPLWRFPNELPIAGEPANIVALVEEYMDWLHQSPVPKLLFWGTPGVLIPPAEAARLAKSLPNCKAVDIGPGLNLLVEDNPDLIGSEIARWLSTLEISG

SEQ ID NO: 2703 - protein, 277 aa, Synthetic construct
MFHYVDVGPRDGTPVLFLHGNPTSSYVWRNIIPHVAPTHRCIAPDLIGMGKSDKPDLGYFFDDHVRFMDAFIEALGLEEVVLVIHDWGSALGFHWAKRNPERVKGIAFMEFIRPIPTWDEWPEFARETFQAFRTTDVGRKLIIDQNVFIEGTLPMGVVRPLTEVEMDHYREPFLNPVDREPLWRFPNELPIAGEPANIVALVEEYMDWLHQSPVPKLLFWGTPGVLIPPAEAARLAKSLPNCKAVDIGPGLNLLQDDNPDLIGSEIARWLSTLEISG

SEQ ID NO: 2704 - protein, 277 aa, Synthetic construct
MFHYVDVGPRDGTPVLFLHGNPTSSYVWRNIIPHVAPTHRCIAPDLIGMGKSDKPDLGYFFDDHVRFMDAFIEALGLEEVVLVIHDWGSALGFHWAKRNPERVKGIAFMEFIRPIPTWDEWPEFARETFQAFRTTDVGRKLIIDQNVFIEGTLPMGVVRPLTEVEMDHYREPFLNPVDREPLWRFPNELPIAGEPANIVALVEEYMDWLHQSPVPKLLFWGTPGVLIPPAEAARLAKSLPNCKAVDIGPGLNLLQQDNPDLIGSEIARWLSTLEISG

SEQ ID NO: 2705 - protein, 277 aa, Synthetic construct
MFHYVDVGPRDGTPVLFLHGNPTSSYVWRNIIPHVAPTHRCIAPDLIGMGKSDKPDLGYFFDDHVRFMDAFIEALGLEEVVLVIHDWGSALGFHWAKRNPERVKGIAFMEFIRPIPTWDEWPEFARETFQAFRTTDVGRKLIIDQNVFIEGTLPMGVVRPLTEVEMDHYREPFLNPVDREPLWRFPNELPIAGEPANIVALVEEYMDWLHQSPVPKLLFWGTPGVLIPPAEAARLAKSLPNCKAVDIGPGLNLLQADNPDLIGSEIARWLSTLEISG

SEQ ID NO: 2706 - protein, 277 aa, Synthetic construct
MFHYVDVGPRDGTPVLFLHGNPTSSYVWRNIIPHVAPTHRCIAPDLIGMGKSDKPDLGYFFDDHVRFMDAFIEALGLEEVVLVIHDWGSALGFHWAKRNPERVKGIAFMEFIRPIPTWDEWPEFARETFQAFRTTDVGRKLIIDQNVFIEGTLPMGVVRPLTEVEMDHYREPFLNPVDREPLWRFPNELPIAGEPANIVALVEEYMDWLHQSPVPKLLFWGTPGVLIPPAEAARLAKSLPNCKAVDIGPGLNLLQHDNPDLIGSEIARWLSTLEISG

SEQ ID NO: 2707 - protein, 277 aa, Synthetic construct
MFHYVDVGPRDGTPVLFLHGNPTSSYVWRNIIPHVAPTHRCIAPDLIGMGKSDKPDLGYFFDDHVRFMDAFIEALGLEEVVLVIHDWGSALGFHWAKRNPERVKGIAFMEFIRPIPTWDEWPEFARETFQAFRTTDVGRKLIIDQNVFIEGTLPMGVVRPLTEVEMDHYREPFLNPVDREPLWRFPNELPIAGEPANIVALVEEYMDWLHQSPVPKLLFWGTPGVLIPPAEAARLAKSLPNCKAVDIGPGLNLLQSDNPDLIGSEIARWLSTLEISG

SEQ ID NO: 2708 - protein, 277 aa, Synthetic construct
MFHYVDVGPRDGTPVLFLHGNPTSSYVWRNIIPHVAPTHRCIAPDLIGMGKSDKPDLGYFFDDHVRFMDAFIEALGLEEVVLVIHDWGSALGFHWAKRNPERVKGIAFMEFIRPIPTWDEWPEFARETFQAFRTTDVGRKLIIDQNVFIEGTLPMGVVRPLTEVEMDHYREPFLNPVDREPLWRFPNELPIAGEPANIVALVEEYMDWLHQSPVPKLLFWGTPGVLIPPAEAARLAKSLPNCKAVDIGPGLNLLQVDNPDLIGSEIARWLSTLEISG

SEQ ID NO: 2709 - protein, 277 aa, Synthetic construct
MFHYVDVGPRDGTPVLFLHGNPTSSYVWRNIIPHVAPTHRCIAPDLIGMGKSDKPDLGYFFDDHVRFMDAFIEALGLEEVVLVIHDWGSALGFHWAKRNPERVKGIAFMEFIRPIPTWDEWPEFARETFQAFRTTDVGRKLIIDQNVFIEGTLPMGVVRPLTEVEMDHYREPFLNPVDREPLWRFPNELPIAGEPANIVALVEEYMDWLHQSPVPKLLFWGTPGVLIPPAEAARLAKSLPNCKAVDIGPGLNLLQEENPDLIGSEIARWLSTLEISG

SEQ ID NO: 2710 - protein, 277 aa, Synthetic construct
MFHYVDVGPRDGTPVLFLHGNPTSSYVWRNIIPHVAPTHRCIAPDLIGMGKSDKPDLGYFFDDHVRFMDAFIEALGLEEVVLVIHDWGSALGFHWAKRNPERVKGIAFMEFIRPIPTWDEWPEFARETFQAFRTTDVGRKLIIDQNVFIEGTLPMGVVRPLTEVEMDHYREPFLNPVDREPLWRFPNELPIAGEPANIVALVEEYMDWLHQSPVPKLLFWGTPGVLIPPAEAARLAKSLPNCKAVDIGPGLNLLQENNPDLIGSEIARWLSTLEISG

SEQ ID NO: 2711 - protein, 277 aa, Synthetic construct
MFHYVDVGPRDGTPVLFLHGNPTSSYVWRNIIPHVAPTHRCIAPDLIGMGKSDKPDLGYFFDDHVRFMDAFIEALGLEEVVLVIHDWGSALGFHWAKRNPERVKGIAFMEFIRPIPTWDEWPEFARETFQAFRTTDVGRKLIIDQNVFIEGTLPMGVVRPLTEVEMDHYREPFLNPVDREPLWRFPNELPIAGEPANIVALVEEYMDWLHQSPVPKLLFWGTPGVLIPPAEAARLAKSLPNCKAVDIGPGLNLLQESNPDLIGSEIARWLSTLEISG

SEQ ID NO: 2712 - protein, 277 aa, Synthetic construct
MFHYVDVGPRDGTPVLFLHGNPTSSYVWRNIIPHVAPTHRCIAPDLIGMGKSDKPDLGYFFDDHVRFMDAFIEALGLEEVVLVIHDWGSALGFHWAKRNPERVKGIAFMEFIRPIPTWDEWPEFARETFQAFRTTDVGRKLIIDQNVFIEGTLPMGVVRPLTEVEMDHYREPFLNPVDREPLWRFPNELPIAGEPANIVALVEEYMDWLHQSPVPKLLFWGTPGVLIPPAEAARLAKSLPNCKAVDIGPGLNLLQEHNPDLIGSEIARWLSTLEISG

SEQ ID NO: 2713 - protein, 277 aa, Synthetic construct
MFHYVDVGPRDGTPVLFLHGNPTSSYVWRNIIPHVAPTHRCIAPDLIGMGKSDKPDLGYFFDDHVRFMDAFIEALGLEEVVLVIHDWGSALGFHWAKRNPERVKGIAFMEFIRPIPTWDEWPEFARETFQAFRTTDVGRKLIIDQNVFIEGTLPMGVVRPLTEVEMDHYREPFLNPVDREPLWRFPNELPIAGEPANIVALVEEYMDWLHQSPVPKLLFWGTPGVLIPPAEAARLAKSLPNCKAVDIGPGLNLLQEANPDLIGSEIARWLSTLEISG

SEQ ID NO: 2714 - protein, 277 aa, Synthetic construct
MFHYVDVGPRDGTPVLFLHGNPTSSYVWRNIIPHVAPTHRCIAPDLIGMGKSDKPDLGYFFDDHVRFMDAFIEALGLEEVVLVIHDWGSALGFHWAKRNPERVKGIAFMEFIRPIPTWDEWPEFARETFQAFRTTDVGRKLIIDQNVFIEGTLPMGVVRPLTEVEMDHYREPFLNPVDREPLWRFPNELPIAGEPANIVALVEEYMDWLHQSPVPKLLFWGTPGVLIPPAEAARLAKSLPNCKAVDIGPGLNLLQETNPDLIGSEIARWLSTLEISG

SEQ ID NO: 2715 - protein, 277 aa, Synthetic construct
MFHYVDVGPRDGTPVLFLHGNPTSSYVWRNIIPHVAPTHRCIAPDLIGMGKSDKPDLGYFFDDHVRFMDAFIEALGLEEVVLVIHDWGSALGFHWAKRNPERVKGIAFMEFIRPIPTWDEWPEFARETFQAFRTTDVGRKLIIDQNVFIEGTLPMGVVRPLTEVEMDHYREPFLNPVDREPLWRFPNELPIAGEPANIVALVEEYMDWLHQSPVPKLLFWGTPGVLIPPAEAARLAKSLPNCKAVDIGPGLNLLQEDAPDLIGSEIARWLSTLEISG

SEQ ID NO: 2716 - protein, 277 aa, Synthetic construct
MFHYVDVGPRDGTPVLFLHGNPTSSYVWRNIIPHVAPTHRCIAPDLIGMGKSDKPDLGYFFDDHVRFMDAFIEALGLEEVVLVIHDWGSALGFHWAKRNPERVKGIAFMEFIRPIPTWDEWPEFARETFQAFRTTDVGRKLIIDQNVFIEGTLPMGVVRPLTEVEMDHYREPFLNPVDREPLWRFPNELPIAGEPANIVALVEEYMDWLHQSPVPKLLFWGTPGVLIPPAEAARLAKSLPNCKAVDIGPGLNLLQEDQPDLIGSEIARWLSTLEISG

SEQ ID NO: 2717 - protein, 277 aa, Synthetic construct
MFHYVDVGPRDGTPVLFLHGNPTSSYVWRNIIPHVAPTHRCIAPDLIGMGKSDKPDLGYFFDDHVRFMDAFIEALGLEEVVLVIHDWGSALGFHWAKRNPERVKGIAFMEFIRPIPTWDEWPEFARETFQAFRTTDVGRKLIIDQNVFIEGTLPMGVVRPLTEVEMDHYREPFLNPVDREPLWRFPNELPIAGEPANIVALVEEYMDWLHQSPVPKLLFWGTPGVLIPPAEAARLAKSLPNCKAVDIGPGLNLLQEDSPDLIGSEIARWLSTLEISG

SEQ ID NO: 2718 - protein, 277 aa, Synthetic construct
MFHYVDVGPRDGTPVLFLHGNPTSSYVWRNIIPHVAPTHRCIAPDLIGMGKSDKPDLGYFFDDHVRFMDAFIEALGLEEVVLVIHDWGSALGFHWAKRNPERVKGIAFMEFIRPIPTWDEWPEFARETFQAFRTTDVGRKLIIDQNVFIEGTLPMGVVRPLTEVEMDHYREPFLNPVDREPLWRFPNELPIAGEPANIVALVEEYMDWLHQSPVPKLLFWGTPGVLIPPAEAARLAKSLPNCKAVDIGPGLNLLQEDHPDLIGSEIARWLSTLEISG

SEQ ID NO: 2719 - protein, 277 aa, Synthetic construct
MFHYVDVGPRDGTPVLFLHGNPTSSYVWRNIIPHVAPTHRCIAPDLIGMGKSDKPDLGYFFDDHVRFMDAFIEALGLEEVVLVIHDWGSALGFHWAKRNPERVKGIAFMEFIRPIPTWDEWPEFARETFQAFRTTDVGRKLIIDQNVFIEGTLPMGVVRPLTEVEMDHYREPFLNPVDREPLWRFPNELPIAGEPANIVALVEEYMDWLHQSPVPKLLFWGTPGVLIPPAEAARLAKSLPNCKAVDIGPGLNLLQEDRPDLIGSEIARWLSTLEISG

SEQ ID NO: 2720 - protein, 277 aa, Synthetic construct
MFHYVDVGPRDGTPVLFLHGNPTSSYVWRNIIPHVAPTHRCIAPDLIGMGKSDKPDLGYFFDDHVRFMDAFIEALGLEEVVLVIHDWGSALGFHWAKRNPERVKGIAFMEFIRPIPTWDEWPEFARETFQAFRTTDVGRKLIIDQNVFIEGTLPMGVVRPLTEVEMDHYREPFLNPVDREPLWRFPNELPIAGEPANIVALVEEYMDWLHQSPVPKLLFWGTPGVLIPPAEAARLAKSLPNCKAVDIGPGLNLLQEDKPDLIGSEIARWLSTLEISG

SEQ ID NO: 2721 - protein, 277 aa, Synthetic construct
MFHYVDVGPRDGTPVLFLHGNPTSSYVWRNIIPHVAPTHRCIAPDLIGMGKSDKPDLGYFFDDHVRFMDAFIEALGLEEVVLVIHDWGSALGFHWAKRNPERVKGIAFMEFIRPIPTWDEWPEFARETFQAFRTTDVGRKLIIDQNVFIEGTLPMGVVRPLTEVEMDHYREPFLNPVDREPLWRFPNELPIAGEPANIVALVEEYMDWLHQSPVPKLLFWGTPGVLIPPAEAARLAKSLPNCKAVDIGPGLNLLQEDNADLIGSEIARWLSTLEISG

SEQ ID NO: 2722 - protein, 277 aa, Synthetic construct
MFHYVDVGPRDGTPVLFLHGNPTSSYVWRNIIPHVAPTHRCIAPDLIGMGKSDKPDLGYFFDDHVRFMDAFIEALGLEEVVLVIHDWGSALGFHWAKRNPERVKGIAFMEFIRPIPTWDEWPEFARETFQAFRTTDVGRKLIIDQNVFIEGTLPMGVVRPLTEVEMDHYREPFLNPVDREPLWRFPNELPIAGEPANIVALVEEYMDWLHQSPVPKLLFWGTPGVLIPPAEAARLAKSLPNCKAVDIGPGLNLLQEDNGDLIGSEIARWLSTLEISG

SEQ ID NO: 2723 - protein, 277 aa, Synthetic construct
MFHYVDVGPRDGTPVLFLHGNPTSSYVWRNIIPHVAPTHRCIAPDLIGMGKSDKPDLGYFFDDHVRFMDAFIEALGLEEVVLVIHDWGSALGFHWAKRNPERVKGIAFMEFIRPIPTWDEWPEFARETFQAFRTTDVGRKLIIDQNVFIEGTLPMGVVRPLTEVEMDHYREPFLNPVDREPLWRFPNELPIAGEPANIVALVEEYMDWLHQSPVPKLLFWGTPGVLIPPAEAARLAKSLPNCKAVDIGPGLNLLQEDNSDLIGSEIARWLSTLEISG

SEQ ID NO: 2724 - protein, 277 aa, Synthetic construct
MFHYVDVGPRDGTPVLFLHGNPTSSYVWRNIIPHVAPTHRCIAPDLIGMGKSDKPDLGYFFDDHVRFMDAFIEALGLEEVVLVIHDWGSALGFHWAKRNPERVKGIAFMEFIRPIPTWDEWPEFARETFQAFRTTDVGRKLIIDQNVFIEGTLPMGVVRPLTEVEMDHYREPFLNPVDREPLWRFPNELPIAGEPANIVALVEEYMDWLHQSPVPKLLFWGTPGVLIPPAEAARLAKSLPNCKAVDIGPGLNLLQEDNHDLIGSEIARWLSTLEISG

SEQ ID NO: 2725 - protein, 277 aa, Synthetic construct
MFHYVDVGPRDGTPVLFLHGNPTSSYVWRNIIPHVAPTHRCIAPDLIGMGKSDKPDLGYFFDDHVRFMDAFIEALGLEEVVLVIHDWGSALGFHWAKRNPERVKGIAFMEFIRPIPTWDEWPEFARETFQAFRTTDVGRKLIIDQNVFIEGTLPMGVVRPLTEVEMDHYREPFLNPVDREPLWRFPNELPIAGEPANIVALVEEYMDWLHQSPVPKLLFWGTPGVLIPPAEAARLAKSLPNCKAVDIGPGLNLLQEDNTDLIGSEIARWLSTLEISG

SEQ ID NO: 2726 - protein, 277 aa, Synthetic construct
MFHYVDVGPRDGTPVLFLHGNPTSSYVWRNIIPHVAPTHRCIAPDLIGMGKSDKPDLGYFFDDHVRFMDAFIEALGLEEVVLVIHDWGSALGFHWAKRNPERVKGIAFMEFIRPIPTWDEWPEFARETFQAFRTTDVGRKLIIDQNVFIEGTLPMGVVRPLTEVEMDHYREPFLNPVDREPLWRFPNELPIAGEPANIVALVEEYMDWLHQSPVPKLLFWGTPGVLIPPAEAARLAKSLPNCKAVDIGPGLNLLQEDNLDLIGSEIARWLSTLEISG

SEQ ID NO: 2727 - protein, 277 aa, Synthetic construct
MFHYVDVGPRDGTPVLFLHGNPTSSYVWRNIIPHVAPTHRCIAPDLIGMGKSDKPDLGYFFDDHVRFMDAFIEALGLEEVVLVIHDWGSALGFHWAKRNPERVKGIAFMEFIRPIPTWDEWPEFARETFQAFRTTDVGRKLIIDQNVFIEGTLPMGVVRPLTEVEMDHYREPFLNPVDREPLWRFPNELPIAGEPANIVALVEEYMDWLHQSPVPKLLFWGTPGVLIPPAEAARLAKSLPNCKAVDIGPGLNLLQEDNPELIGSEIARWLSTLEISG

SEQ ID NO: 2728 - protein, 277 aa, Synthetic construct
MFHYVDVGPRDGTPVLFLHGNPTSSYVWRNIIPHVAPTHRCIAPDLIGMGKSDKPDLGYFFDDHVRFMDAFIEALGLEEVVLVIHDWGSALGFHWAKRNPERVKGIAFMEFIRPIPTWDEWPEFARETFQAFRTTDVGRKLIIDQNVFIEGTLPMGVVRPLTEVEMDHYREPFLNPVDREPLWRFPNELPIAGEPANIVALVEEYMDWLHQSPVPKLLFWGTPGVLIPPAEAARLAKSLPNCKAVDIGPGLNLLQEDNPALIGSEIARWLSTLEISG

SEQ ID NO: 2729 - protein, 277 aa, Synthetic construct
MFHYVDVGPRDGTPVLFLHGNPTSSYVWRNIIPHVAPTHRCIAPDLIGMGKSDKPDLGYFFDDHVRFMDAFIEALGLEEVVLVIHDWGSALGFHWAKRNPERVKGIAFMEFIRPIPTWDEWPEFARETFQAFRTTDVGRKLIIDQNVFIEGTLPMGVVRPLTEVEMDHYREPFLNPVDREPLWRFPNELPIAGEPANIVALVEEYMDWLHQSPVPKLLFWGTPGVLIPPAEAARLAKSLPNCKAVDIGPGLNLLQEDNPQLIGSEIARWLSTLEISG

SEQ ID NO: 2730 - protein, 277 aa, Synthetic construct
MFHYVDVGPRDGTPVLFLHGNPTSSYVWRNIIPHVAPTHRCIAPDLIGMGKSDKPDLGYFFDDHVRFMDAFIEALGLEEVVLVIHDWGSALGFHWAKRNPERVKGIAFMEFIRPIPTWDEWPEFARETFQAFRTTDVGRKLIIDQNVFIEGTLPMGVVRPLTEVEMDHYREPFLNPVDREPLWRFPNELPIAGEPANIVALVEEYMDWLHQSPVPKLLFWGTPGVLIPPAEAARLAKSLPNCKAVDIGPGLNLLQEDNPHLIGSEIARWLSTLEISG

SEQ ID NO: 2731 - protein, 277 aa, Synthetic construct
MFHYVDVGPRDGTPVLFLHGNPTSSYVWRNIIPHVAPTHRCIAPDLIGMGKSDKPDLGYFFDDHVRFMDAFIEALGLEEVVLVIHDWGSALGFHWAKRNPERVKGIAFMEFIRPIPTWDEWPEFARETFQAFRTTDVGRKLIIDQNVFIEGTLPMGVVRPLTEVEMDHYREPFLNPVDREPLWRFPNELPIAGEPANIVALVEEYMDWLHQSPVPKLLFWGTPGVLIPPAEAARLAKSLPNCKAVDIGPGLNLLQEDNPGLIGSEIARWLSTLEISG

SEQ ID NO: 2732 - protein, 277 aa, Synthetic construct
MFHYVDVGPRDGTPVLFLHGNPTSSYVWRNIIPHVAPTHRCIAPDLIGMGKSDKPDLGYFFDDHVRFMDAFIEALGLEEVVLVIHDWGSALGFHWAKRNPERVKGIAFMEFIRPIPTWDEWPEFARETFQAFRTTDVGRKLIIDQNVFIEGTLPMGVVRPLTEVEMDHYREPFLNPVDREPLWRFPNELPIAGEPANIVALVEEYMDWLHQSPVPKLLFWGTPGVLIPPAEAARLAKSLPNCKAVDIGPGLNLLQEDNPTLIGSEIARWLSTLEISG

SEQ ID NO: 2733 - protein, 277 aa, Synthetic construct
MFHYVDVGPRDGTPVLFLHGNPTSSYVWRNIIPHVAPTHRCIAPDLIGMGKSDKPDLGYFFDDHVRFMDAFIEALGLEEVVLVIHDWGSALGFHWAKRNPERVKGIAFMEFIRPIPTWDEWPEFARETFQAFRTTDVGRKLIIDQNVFIEGTLPMGVVRPLTEVEMDHYREPFLNPVDREPLWRFPNELPIAGEPANIVALVEEYMDWLHQSPVPKLLFWGTPGVLIPPAEAARLAKSLPNCKAVDIGPGLNLLQEDNPDAIGSEIARWLSTLEISG

SEQ ID NO: 2734 - protein, 277 aa, Synthetic construct
MFHYVDVGPRDGTPVLFLHGNPTSSYVWRNIIPHVAPTHRCIAPDLIGMGKSDKPDLGYFFDDHVRFMDAFIEALGLEEVVLVIHDWGSALGFHWAKRNPERVKGIAFMEFIRPIPTWDEWPEFARETFQAFRTTDVGRKLIIDQNVFIEGTLPMGVVRPLTEVEMDHYREPFLNPVDREPLWRFPNELPIAGEPANIVALVEEYMDWLHQSPVPKLLFWGTPGVLIPPAEAARLAKSLPNCKAVDIGPGLNLLQEDNPDVIGSEIARWLSTLEISG

SEQ ID NO: 2735 - protein, 277 aa, Synthetic construct
MFHYVDVGPRDGTPVLFLHGNPTSSYVWRNIIPHVAPTHRCIAPDLIGMGKSDKPDLGYFFDDHVRFMDAFIEALGLEEVVLVIHDWGSALGFHWAKRNPERVKGIAFMEFIRPIPTWDEWPEFARETFQAFRTTDVGRKLIIDQNVFIEGTLPMGVVRPLTEVEMDHYREPFLNPVDREPLWRFPNELPIAGEPANIVALVEEYMDWLHQSPVPKLLFWGTPGVLIPPAEAARLAKSLPNCKAVDIGPGLNLLQEDNPDEIGSEIARWLSTLEISG

SEQ ID NO: 2736 - protein, 277 aa, Synthetic construct
MFHYVDVGPRDGTPVLFLHGNPTSSYVWRNIIPHVAPTHRCIAPDLIGMGKSDKPDLGYFFDDHVRFMDAFIEALGLEEVVLVIHDWGSALGFHWAKRNPERVKGIAFMEFIRPIPTWDEWPEFARETFQAFRTTDVGRKLIIDQNVFIEGTLPMGVVRPLTEVEMDHYREPFLNPVDREPLWRFPNELPIAGEPANIVALVEEYMDWLHQSPVPKLLFWGTPGVLIPPAEAARLAKSLPNCKAVDIGPGLNLLQEDNPDRIGSEIARWLSTLEISG

SEQ ID NO: 2737 - protein, 277 aa, Synthetic construct
MFHYVDVGPRDGTPVLFLHGNPTSSYVWRNIIPHVAPTHRCIAPDLIGMGKSDKPDLGYFFDDHVRFMDAFIEALGLEEVVLVIHDWGSALGFHWAKRNPERVKGIAFMEFIRPIPTWDEWPEFARETFQAFRTTDVGRKLIIDQNVFIEGTLPMGVVRPLTEVEMDHYREPFLNPVDREPLWRFPNELPIAGEPANIVALVEEYMDWLHQSPVPKLLFWGTPGVLIPPAEAARLAKSLPNCKAVDIGPGLNLLQEDNPDQIGSEIARWLSTLEISG

SEQ ID NO: 2738 - protein, 277 aa, Synthetic construct
MFHYVDVGPRDGTPVLFLHGNPTSSYVWRNIIPHVAPTHRCIAPDLIGMGKSDKPDLGYFFDDHVRFMDAFIEALGLEEVVLVIHDWGSALGFHWAKRNPERVKGIAFMEFIRPIPTWDEWPEFARETFQAFRTTDVGRKLIIDQNVFIEGTLPMGVVRPLTEVEMDHYREPFLNPVDREPLWRFPNELPIAGEPANIVALVEEYMDWLHQSPVPKLLFWGTPGVLIPPAEAARLAKSLPNCKAVDIGPGLNLLQEDNPDTIGSEIARWLSTLEISG

SEQ ID NO: 2739 - protein, 277 aa, Synthetic construct
MFHYVDVGPRDGTPVLFLHGNPTSSYVWRNIIPHVAPTHRCIAPDLIGMGKSDKPDLGYFFDDHVRFMDAFIEALGLEEVVLVIHDWGSALGFHWAKRNPERVKGIAFMEFIRPIPTWDEWPEFARETFQAFRTTDVGRKLIIDQNVFIEGTLPMGVVRPLTEVEMDHYREPFLNPVDREPLWRFPNELPIAGEPANIVALVEEYMDWLHQSPVPKLLFWGTPGVLIPPAEAARLAKSLPNCKAVDIGPGLNLLQEDNPDLVGSEIARWLSTLEISG

SEQ ID NO: 2740 - protein, 277 aa, Synthetic construct
MFHYVDVGPRDGTPVLFLHGNPTSSYVWRNIIPHVAPTHRCIAPDLIGMGKSDKPDLGYFFDDHVRFMDAFIEALGLEEVVLVIHDWGSALGFHWAKRNPERVKGIAFMEFIRPIPTWDEWPEFARETFQAFRTTDVGRKLIIDQNVFIEGTLPMGVVRPLTEVEMDHYREPFLNPVDREPLWRFPNELPIAGEPANIVALVEEYMDWLHQSPVPKLLFWGTPGVLIPPAEAARLAKSLPNCKAVDIGPGLNLLQEDNPDLLGSEIARWLSTLEISG

SEQ ID NO: 2741 - protein, 277 aa, Synthetic construct
MFHYVDVGPRDGTPVLFLHGNPTSSYVWRNIIPHVAPTHRCIAPDLIGMGKSDKPDLGYFFDDHVRFMDAFIEALGLEEVVLVIHDWGSALGFHWAKRNPERVKGIAFMEFIRPIPTWDEWPEFARETFQAFRTTDVGRKLIIDQNVFIEGTLPMGVVRPLTEVEMDHYREPFLNPVDREPLWRFPNELPIAGEPANIVALVEEYMDWLHQSPVPKLLFWGTPGVLIPPAEAARLAKSLPNCKAVDIGPGLNLLQEDNPDLMGSEIARWLSTLEISG

SEQ ID NO: 2742 - protein, 277 aa, Synthetic construct
MFHYVDVGPRDGTPVLFLHGNPTSSYVWRNIIPHVAPTHRCIAPDLIGMGKSDKPDLGYFFDDHVRFMDAFIEALGLEEVVLVIHDWGSALGFHWAKRNPERVKGIAFMEFIRPIPTWDEWPEFARETFQAFRTTDVGRKLIIDQNVFIEGTLPMGVVRPLTEVEMDHYREPFLNPVDREPLWRFPNELPIAGEPANIVALVEEYMDWLHQSPVPKLLFWGTPGVLIPPAEAARLAKSLPNCKAVDIGPGLNLLQEDNPDLAGSEIARWLSTLEISG

SEQ ID NO: 2743 - protein, 277 aa, Synthetic construct
MFHYVDVGPRDGTPVLFLHGNPTSSYVWRNIIPHVAPTHRCIAPDLIGMGKSDKPDLGYFFDDHVRFMDAFIEALGLEEVVLVIHDWGSALGFHWAKRNPERVKGIAFMEFIRPIPTWDEWPEFARETFQAFRTTDVGRKLIIDQNVFIEGTLPMGVVRPLTEVEMDHYREPFLNPVDREPLWRFPNELPIAGEPANIVALVEEYMDWLHQSPVPKLLFWGTPGVLIPPAEAARLAKSLPNCKAVDIGPGLNLLQEDNPDLTGSEIARWLSTLEISG

SEQ ID NO: 2744 - protein, 277 aa, Synthetic construct
MFHYVDVGPRDGTPVLFLHGNPTSSYVWRNIIPHVAPTHRCIAPDLIGMGKSDKPDLGYFFDDHVRFMDAFIEALGLEEVVLVIHDWGSALGFHWAKRNPERVKGIAFMEFIRPIPTWDEWPEFARETFQAFRTTDVGRKLIIDQNVFIEGTLPMGVVRPLTEVEMDHYREPFLNPVDREPLWRFPNELPIAGEPANIVALVEEYMDWLHQSPVPKLLFWGTPGVLIPPAEAARLAKSLPNCKAVDIGPGLNLLQEDNPDLFGSEIARWLSTLEISG

SEQ ID NO: 2745 - protein, 277 aa, Synthetic construct
MFHYVDVGPRDGTPVLFLHGNPTSSYVWRNIIPHVAPTHRCIAPDLIGMGKSDKPDLGYFFDDHVRFMDAFIEALGLEEVVLVIHDWGSALGFHWAKRNPERVKGIAFMEFIRPIPTWDEWPEFARETFQAFRTTDVGRKLIIDQNVFIEGTLPMGVVRPLTEVEMDHYREPFLNPVDREPLWRFPNELPIAGEPANIVALVEEYMDWLHQSPVPKLLFWGTPGVLIPPAEAARLAKSLPNCKAVDIGPGLNLLQEDNPDLIASEIARWLSTLEISG

SEQ ID NO: 2746 - protein, 277 aa, Synthetic construct
MFHYVDVGPRDGTPVLFLHGNPTSSYVWRNIIPHVAPTHRCIAPDLIGMGKSDKPDLGYFFDDHVRFMDAFIEALGLEEVVLVIHDWGSALGFHWAKRNPERVKGIAFMEFIRPIPTWDEWPEFARETFQAFRTTDVGRKLIIDQNVFIEGTLPMGVVRPLTEVEMDHYREPFLNPVDREPLWRFPNELPIAGEPANIVALVEEYMDWLHQSPVPKLLFWGTPGVLIPPAEAARLAKSLPNCKAVDIGPGLNLLQEDNPDLISSEIARWLSTLEISG

SEQ ID NO: 2747 - protein, 277 aa, Synthetic construct
MFHYVDVGPRDGTPVLFLHGNPTSSYVWRNIIPHVAPTHRCIAPDLIGMGKSDKPDLGYFFDDHVRFMDAFIEALGLEEVVLVIHDWGSALGFHWAKRNPERVKGIAFMEFIRPIPTWDEWPEFARETFQAFRTTDVGRKLIIDQNVFIEGTLPMGVVRPLTEVEMDHYREPFLNPVDREPLWRFPNELPIAGEPANIVALVEEYMDWLHQSPVPKLLFWGTPGVLIPPAEAARLAKSLPNCKAVDIGPGLNLLQEDNPDLITSEIARWLSTLEISG

SEQ ID NO: 2748 - protein, 277 aa, Synthetic construct
MFHYVDVGPRDGTPVLFLHGNPTSSYVWRNIIPHVAPTHRCIAPDLIGMGKSDKPDLGYFFDDHVRFMDAFIEALGLEEVVLVIHDWGSALGFHWAKRNPERVKGIAFMEFIRPIPTWDEWPEFARETFQAFRTTDVGRKLIIDQNVFIEGTLPMGVVRPLTEVEMDHYREPFLNPVDREPLWRFPNELPIAGEPANIVALVEEYMDWLHQSPVPKLLFWGTPGVLIPPAEAARLAKSLPNCKAVDIGPGLNLLQEDNPDLIVSEIARWLSTLEISG

SEQ ID NO: 2749 - protein, 277 aa, Synthetic construct
MFHYVDVGPRDGTPVLFLHGNPTSSYVWRNIIPHVAPTHRCIAPDLIGMGKSDKPDLGYFFDDHVRFMDAFIEALGLEEVVLVIHDWGSALGFHWAKRNPERVKGIAFMEFIRPIPTWDEWPEFARETFQAFRTTDVGRKLIIDQNVFIEGTLPMGVVRPLTEVEMDHYREPFLNPVDREPLWRFPNELPIAGEPANIVALVEEYMDWLHQSPVPKLLFWGTPGVLIPPAEAARLAKSLPNCKAVDIGPGLNLLQEDNPDLICSEIARWLSTLEISG

SEQ ID NO: 2750 - protein, 277 aa, Synthetic construct
MFHYVDVGPRDGTPVLFLHGNPTSSYVWRNIIPHVAPTHRCIAPDLIGMGKSDKPDLGYFFDDHVRFMDAFIEALGLEEVVLVIHDWGSALGFHWAKRNPERVKGIAFMEFIRPIPTWDEWPEFARETFQAFRTTDVGRKLIIDQNVFIEGTLPMGVVRPLTEVEMDHYREPFLNPVDREPLWRFPNELPIAGEPANIVALVEEYMDWLHQSPVPKLLFWGTPGVLIPPAEAARLAKSLPNCKAVDIGPGLNLLQEDNPDLIRSEIARWLSTLEISG

SEQ ID NO: 2751 - protein, 277 aa, Synthetic construct
MFHYVDVGPRDGTPVLFLHGNPTSSYVWRNIIPHVAPTHRCIAPDLIGMGKSDKPDLGYFFDDHVRFMDAFIEALGLEEVVLVIHDWGSALGFHWAKRNPERVKGIAFMEFIRPIPTWDEWPEFARETFQAFRTTDVGRKLIIDQNVFIEGTLPMGVVRPLTEVEMDHYREPFLNPVDREPLWRFPNELPIAGEPANIVALVEEYMDWLHQSPVPKLLFWGTPGVLIPPAEAARLAKSLPNCKAVDIGPGLNLLQEDNPDLIGAEIARWLSTLEISG

SEQ ID NO: 2752 - protein, 277 aa, Synthetic construct
MFHYVDVGPRDGTPVLFLHGNPTSSYVWRNIIPHVAPTHRCIAPDLIGMGKSDKPDLGYFFDDHVRFMDAFIEALGLEEVVLVIHDWGSALGFHWAKRNPERVKGIAFMEFIRPIPTWDEWPEFARETFQAFRTTDVGRKLIIDQNVFIEGTLPMGVVRPLTEVEMDHYREPFLNPVDREPLWRFPNELPIAGEPANIVALVEEYMDWLHQSPVPKLLFWGTPGVLIPPAEAARLAKSLPNCKAVDIGPGLNLLQEDNPDLIGREIARWLSTLEISG

SEQ ID NO: 2753 - protein, 277 aa, Synthetic construct
MFHYVDVGPRDGTPVLFLHGNPTSSYVWRNIIPHVAPTHRCIAPDLIGMGKSDKPDLGYFFDDHVRFMDAFIEALGLEEVVLVIHDWGSALGFHWAKRNPERVKGIAFMEFIRPIPTWDEWPEFARETFQAFRTTDVGRKLIIDQNVFIEGTLPMGVVRPLTEVEMDHYREPFLNPVDREPLWRFPNELPIAGEPANIVALVEEYMDWLHQSPVPKLLFWGTPGVLIPPAEAARLAKSLPNCKAVDIGPGLNLLQEDNPDLIGEEIARWLSTLEISG

SEQ ID NO: 2754 - protein, 277 aa, Synthetic construct
MFHYVDVGPRDGTPVLFLHGNPTSSYVWRNIIPHVAPTHRCIAPDLIGMGKSDKPDLGYFFDDHVRFMDAFIEALGLEEVVLVIHDWGSALGFHWAKRNPERVKGIAFMEFIRPIPTWDEWPEFARETFQAFRTTDVGRKLIIDQNVFIEGTLPMGVVRPLTEVEMDHYREPFLNPVDREPLWRFPNELPIAGEPANIVALVEEYMDWLHQSPVPKLLFWGTPGVLIPPAEAARLAKSLPNCKAVDIGPGLNLLQEDNPDLIGQEIARWLSTLEISG

SEQ ID NO: 2755 - protein, 277 aa, Synthetic construct
MFHYVDVGPRDGTPVLFLHGNPTSSYVWRNIIPHVAPTHRCIAPDLIGMGKSDKPDLGYFFDDHVRFMDAFIEALGLEEVVLVIHDWGSALGFHWAKRNPERVKGIAFMEFIRPIPTWDEWPEFARETFQAFRTTDVGRKLIIDQNVFIEGTLPMGVVRPLTEVEMDHYREPFLNPVDREPLWRFPNELPIAGEPANIVALVEEYMDWLHQSPVPKLLFWGTPGVLIPPAEAARLAKSLPNCKAVDIGPGLNLLQEDNPDLIGKEIARWLSTLEISG

SEQ ID NO: 2756 - protein, 277 aa, Synthetic construct
MFHYVDVGPRDGTPVLFLHGNPTSSYVWRNIIPHVAPTHRCIAPDLIGMGKSDKPDLGYFFDDHVRFMDAFIEALGLEEVVLVIHDWGSALGFHWAKRNPERVKGIAFMEFIRPIPTWDEWPEFARETFQAFRTTDVGRKLIIDQNVFIEGTLPMGVVRPLTEVEMDHYREPFLNPVDREPLWRFPNELPIAGEPANIVALVEEYMDWLHQSPVPKLLFWGTPGVLIPPAEAARLAKSLPNCKAVDIGPGLNLLQEDNPDLIGTEIARWLSTLEISG

SEQ ID NO: 2757 - protein, 277 aa, Synthetic construct
MFHYVDVGPRDGTPVLFLHGNPTSSYVWRNIIPHVAPTHRCIAPDLIGMGKSDKPDLGYFFDDHVRFMDAFIEALGLEEVVLVIHDWGSALGFHWAKRNPERVKGIAFMEFIRPIPTWDEWPEFARETFQAFRTTDVGRKLIIDQNVFIEGTLPMGVVRPLTEVEMDHYREPFLNPVDREPLWRFPNELPIAGEPANIVALVEEYMDWLHQSPVPKLLFWGTPGVLIPPAEAARLAKSLPNCKAVDIGPGLNLLQEDNPDLIGSAIARWLSTLEISG

SEQ ID NO: 2758 - protein, 277 aa, Synthetic construct
MFHYVDVGPRDGTPVLFLHGNPTSSYVWRNIIPHVAPTHRCIAPDLIGMGKSDKPDLGYFFDDHVRFMDAFIEALGLEEVVLVIHDWGSALGFHWAKRNPERVKGIAFMEFIRPIPTWDEWPEFARETFQAFRTTDVGRKLIIDQNVFIEGTLPMGVVRPLTEVEMDHYREPFLNPVDREPLWRFPNELPIAGEPANIVALVEEYMDWLHQSPVPKLLFWGTPGVLIPPAEAARLAKSLPNCKAVDIGPGLNLLQEDNPDLIGSTIARWLSTLEISG

SEQ ID NO: 2759 - protein, 277 aa, Synthetic construct
MFHYVDVGPRDGTPVLFLHGNPTSSYVWRNIIPHVAPTHRCIAPDLIGMGKSDKPDLGYFFDDHVRFMDAFIEALGLEEVVLVIHDWGSALGFHWAKRNPERVKGIAFMEFIRPIPTWDEWPEFARETFQAFRTTDVGRKLIIDQNVFIEGTLPMGVVRPLTEVEMDHYREPFLNPVDREPLWRFPNELPIAGEPANIVALVEEYMDWLHQSPVPKLLFWGTPGVLIPPAEAARLAKSLPNCKAVDIGPGLNLLQEDNPDLIGSHIARWLSTLEISG

SEQ ID NO: 2760 - protein, 277 aa, Synthetic construct
MFHYVDVGPRDGTPVLFLHGNPTSSYVWRNIIPHVAPTHRCIAPDLIGMGKSDKPDLGYFFDDHVRFMDAFIEALGLEEVVLVIHDWGSALGFHWAKRNPERVKGIAFMEFIRPIPTWDEWPEFARETFQAFRTTDVGRKLIIDQNVFIEGTLPMGVVRPLTEVEMDHYREPFLNPVDREPLWRFPNELPIAGEPANIVALVEEYMDWLHQSPVPKLLFWGTPGVLIPPAEAARLAKSLPNCKAVDIGPGLNLLQEDNPDLIGSSIARWLSTLEISG

SEQ ID NO: 2761 - protein, 277 aa, Synthetic construct
MFHYVDVGPRDGTPVLFLHGNPTSSYVWRNIIPHVAPTHRCIAPDLIGMGKSDKPDLGYFFDDHVRFMDAFIEALGLEEVVLVIHDWGSALGFHWAKRNPERVKGIAFMEFIRPIPTWDEWPEFARETFQAFRTTDVGRKLIIDQNVFIEGTLPMGVVRPLTEVEMDHYREPFLNPVDREPLWRFPNELPIAGEPANIVALVEEYMDWLHQSPVPKLLFWGTPGVLIPPAEAARLAKSLPNCKAVDIGPGLNLLQEDNPDLIGSQIARWLSTLEISG

SEQ ID NO: 2762 - protein, 277 aa, Synthetic construct
MFHYVDVGPRDGTPVLFLHGNPTSSYVWRNIIPHVAPTHRCIAPDLIGMGKSDKPDLGYFFDDHVRFMDAFIEALGLEEVVLVIHDWGSALGFHWAKRNPERVKGIAFMEFIRPIPTWDEWPEFARETFQAFRTTDVGRKLIIDQNVFIEGTLPMGVVRPLTEVEMDHYREPFLNPVDREPLWRFPNELPIAGEPANIVALVEEYMDWLHQSPVPKLLFWGTPGVLIPPAEAARLAKSLPNCKAVDIGPGLNLLQEDNPDLIGSVIARWLSTLEISG

SEQ ID NO: 2763 - protein, 277 aa, Synthetic construct
MFHYVDVGPRDGTPVLFLHGNPTSSYVWRNIIPHVAPTHRCIAPDLIGMGKSDKPDLGYFFDDHVRFMDAFIEALGLEEVVLVIHDWGSALGFHWAKRNPERVKGIAFMEFIRPIPTWDEWPEFARETFQAFRTTDVGRKLIIDQNVFIEGTLPMGVVRPLTEVEMDHYREPFLNPVDREPLWRFPNELPIAGEPANIVALVEEYMDWLHQSPVPKLLFWGTPGVLIPPAEAARLAKSLPNCKAVDIGPGLNLLQEDNPDLIGSELARWLSTLEISG

SEQ ID NO: 2764 - protein, 277 aa, Synthetic construct
MFHYVDVGPRDGTPVLFLHGNPTSSYVWRNIIPHVAPTHRCIAPDLIGMGKSDKPDLGYFFDDHVRFMDAFIEALGLEEVVLVIHDWGSALGFHWAKRNPERVKGIAFMEFIRPIPTWDEWPEFARETFQAFRTTDVGRKLIIDQNVFIEGTLPMGVVRPLTEVEMDHYREPFLNPVDREPLWRFPNELPIAGEPANIVALVEEYMDWLHQSPVPKLLFWGTPGVLIPPAEAARLAKSLPNCKAVDIGPGLNLLQEDNPDLIGSEVARWLSTLEISG

SEQ ID NO: 2765 - protein, 277 aa, Synthetic construct
MFHYVDVGPRDGTPVLFLHGNPTSSYVWRNIIPHVAPTHRCIAPDLIGMGKSDKPDLGYFFDDHVRFMDAFIEALGLEEVVLVIHDWGSALGFHWAKRNPERVKGIAFMEFIRPIPTWDEWPEFARETFQAFRTTDVGRKLIIDQNVFIEGTLPMGVVRPLTEVEMDHYREPFLNPVDREPLWRFPNELPIAGEPANIVALVEEYMDWLHQSPVPKLLFWGTPGVLIPPAEAARLAKSLPNCKAVDIGPGLNLLQEDNPDLIGSEMARWLSTLEISG

SEQ ID NO: 2766 - protein, 277 aa, Synthetic construct
MFHYVDVGPRDGTPVLFLHGNPTSSYVWRNIIPHVAPTHRCIAPDLIGMGKSDKPDLGYFFDDHVRFMDAFIEALGLEEVVLVIHDWGSALGFHWAKRNPERVKGIAFMEFIRPIPTWDEWPEFARETFQAFRTTDVGRKLIIDQNVFIEGTLPMGVVRPLTEVEMDHYREPFLNPVDREPLWRFPNELPIAGEPANIVALVEEYMDWLHQSPVPKLLFWGTPGVLIPPAEAARLAKSLPNCKAVDIGPGLNLLQEDNPDLIGSEFARWLSTLEISG

SEQ ID NO: 2767 - protein, 277 aa, Synthetic construct
MFHYVDVGPRDGTPVLFLHGNPTSSYVWRNIIPHVAPTHRCIAPDLIGMGKSDKPDLGYFFDDHVRFMDAFIEALGLEEVVLVIHDWGSALGFHWAKRNPERVKGIAFMEFIRPIPTWDEWPEFARETFQAFRTTDVGRKLIIDQNVFIEGTLPMGVVRPLTEVEMDHYREPFLNPVDREPLWRFPNELPIAGEPANIVALVEEYMDWLHQSPVPKLLFWGTPGVLIPPAEAARLAKSLPNCKAVDIGPGLNLLQEDNPDLIGSETARWLSTLEISG

SEQ ID NO: 2768 - protein, 277 aa, Synthetic construct
MFHYVDVGPRDGTPVLFLHGNPTSSYVWRNIIPHVAPTHRCIAPDLIGMGKSDKPDLGYFFDDHVRFMDAFIEALGLEEVVLVIHDWGSALGFHWAKRNPERVKGIAFMEFIRPIPTWDEWPEFARETFQAFRTTDVGRKLIIDQNVFIEGTLPMGVVRPLTEVEMDHYREPFLNPVDREPLWRFPNELPIAGEPANIVALVEEYMDWLHQSPVPKLLFWGTPGVLIPPAEAARLAKSLPNCKAVDIGPGLNLLQEDNPDLIGSEAARWLSTLEISG

SEQ ID NO: 2769 - protein, 277 aa, Synthetic construct
MFHYVDVGPRDGTPVLFLHGNPTSSYVWRNIIPHVAPTHRCIAPDLIGMGKSDKPDLGYFFDDHVRFMDAFIEALGLEEVVLVIHDWGSALGFHWAKRNPERVKGIAFMEFIRPIPTWDEWPEFARETFQAFRTTDVGRKLIIDQNVFIEGTLPMGVVRPLTEVEMDHYREPFLNPVDREPLWRFPNELPIAGEPANIVALVEEYMDWLHQSPVPKLLFWGTPGVLIPPAEAARLAKSLPNCKAVDIGPGLNLLQEDNPDLIGSEISRWLSTLEISG

SEQ ID NO: 2770 - protein, 277 aa, Synthetic construct
MFHYVDVGPRDGTPVLFLHGNPTSSYVWRNIIPHVAPTHRCIAPDLIGMGKSDKPDLGYFFDDHVRFMDAFIEALGLEEVVLVIHDWGSALGFHWAKRNPERVKGIAFMEFIRPIPTWDEWPEFARETFQAFRTTDVGRKLIIDQNVFIEGTLPMGVVRPLTEVEMDHYREPFLNPVDREPLWRFPNELPIAGEPANIVALVEEYMDWLHQSPVPKLLFWGTPGVLIPPAEAARLAKSLPNCKAVDIGPGLNLLQEDNPDLIGSEIGRWLSTLEISG

SEQ ID NO: 2771 - protein, 277 aa, Synthetic construct
MFHYVDVGPRDGTPVLFLHGNPTSSYVWRNIIPHVAPTHRCIAPDLIGMGKSDKPDLGYFFDDHVRFMDAFIEALGLEEVVLVIHDWGSALGFHWAKRNPERVKGIAFMEFIRPIPTWDEWPEFARETFQAFRTTDVGRKLIIDQNVFIEGTLPMGVVRPLTEVEMDHYREPFLNPVDREPLWRFPNELPIAGEPANIVALVEEYMDWLHQSPVPKLLFWGTPGVLIPPAEAARLAKSLPNCKAVDIGPGLNLLQEDNPDLIGSEITRWLSTLEISG

SEQ ID NO: 2772 - protein, 277 aa, Synthetic construct
MFHYVDVGPRDGTPVLFLHGNPTSSYVWRNIIPHVAPTHRCIAPDLIGMGKSDKPDLGYFFDDHVRFMDAFIEALGLEEVVLVIHDWGSALGFHWAKRNPERVKGIAFMEFIRPIPTWDEWPEFARETFQAFRTTDVGRKLIIDQNVFIEGTLPMGVVRPLTEVEMDHYREPFLNPVDREPLWRFPNELPIAGEPANIVALVEEYMDWLHQSPVPKLLFWGTPGVLIPPAEAARLAKSLPNCKAVDIGPGLNLLQEDNPDLIGSEINRWLSTLEISG

SEQ ID NO: 2773 - protein, 277 aa, Synthetic construct
MFHYVDVGPRDGTPVLFLHGNPTSSYVWRNIIPHVAPTHRCIAPDLIGMGKSDKPDLGYFFDDHVRFMDAFIEALGLEEVVLVIHDWGSALGFHWAKRNPERVKGIAFMEFIRPIPTWDEWPEFARETFQAFRTTDVGRKLIIDQNVFIEGTLPMGVVRPLTEVEMDHYREPFLNPVDREPLWRFPNELPIAGEPANIVALVEEYMDWLHQSPVPKLLFWGTPGVLIPPAEAARLAKSLPNCKAVDIGPGLNLLQEDNPDLIGSEIRRWLSTLEISG

SEQ ID NO: 2774 - protein, 277 aa, Synthetic construct
MFHYVDVGPRDGTPVLFLHGNPTSSYVWRNIIPHVAPTHRCIAPDLIGMGKSDKPDLGYFFDDHVRFMDAFIEALGLEEVVLVIHDWGSALGFHWAKRNPERVKGIAFMEFIRPIPTWDEWPEFARETFQAFRTTDVGRKLIIDQNVFIEGTLPMGVVRPLTEVEMDHYREPFLNPVDREPLWRFPNELPIAGEPANIVALVEEYMDWLHQSPVPKLLFWGTPGVLIPPAEAARLAKSLPNCKAVDIGPGLNLLQEDNPDLIGSEIVRWLSTLEISG

SEQ ID NO: 2775 - protein, 277 aa, Synthetic construct
MFHYVDVGPRDGTPVLFLHGNPTSSYVWRNIIPHVAPTHRCIAPDLIGMGKSDKPDLGYFFDDHVRFMDAFIEALGLEEVVLVIHDWGSALGFHWAKRNPERVKGIAFMEFIRPIPTWDEWPEFARETFQAFRTTDVGRKLIIDQNVFIEGTLPMGVVRPLTEVEMDHYREPFLNPVDREPLWRFPNELPIAGEPANIVALVEEYMDWLHQSPVPKLLFWGTPGVLIPPAEAARLAKSLPNCKAVDIGPGLNLLQEDNPDLIGSEIAAWLSTLEISG

SEQ ID NO: 2776 - protein, 277 aa, Synthetic construct
MFHYVDVGPRDGTPVLFLHGNPTSSYVWRNIIPHVAPTHRCIAPDLIGMGKSDKPDLGYFFDDHVRFMDAFIEALGLEEVVLVIHDWGSALGFHWAKRNPERVKGIAFMEFIRPIPTWDEWPEFARETFQAFRTTDVGRKLIIDQNVFIEGTLPMGVVRPLTEVEMDHYREPFLNPVDREPLWRFPNELPIAGEPANIVALVEEYMDWLHQSPVPKLLFWGTPGVLIPPAEAARLAKSLPNCKAVDIGPGLNLLQEDNPDLIGSEIADWLSTLEISG

SEQ ID NO: 2777 - protein, 277 aa, Synthetic construct
MFHYVDVGPRDGTPVLFLHGNPTSSYVWRNIIPHVAPTHRCIAPDLIGMGKSDKPDLGYFFDDHVRFMDAFIEALGLEEVVLVIHDWGSALGFHWAKRNPERVKGIAFMEFIRPIPTWDEWPEFARETFQAFRTTDVGRKLIIDQNVFIEGTLPMGVVRPLTEVEMDHYREPFLNPVDREPLWRFPNELPIAGEPANIVALVEEYMDWLHQSPVPKLLFWGTPGVLIPPAEAARLAKSLPNCKAVDIGPGLNLLQEDNPDLIGSEIASWLSTLEISG

SEQ ID NO: 2778 - protein, 277 aa, Synthetic construct
MFHYVDVGPRDGTPVLFLHGNPTSSYVWRNIIPHVAPTHRCIAPDLIGMGKSDKPDLGYFFDDHVRFMDAFIEALGLEEVVLVIHDWGSALGFHWAKRNPERVKGIAFMEFIRPIPTWDEWPEFARETFQAFRTTDVGRKLIIDQNVFIEGTLPMGVVRPLTEVEMDHYREPFLNPVDREPLWRFPNELPIAGEPANIVALVEEYMDWLHQSPVPKLLFWGTPGVLIPPAEAARLAKSLPNCKAVDIGPGLNLLQEDNPDLIGSEIAEWLSTLEISG

SEQ ID NO: 2779 - protein, 277 aa, Synthetic construct
MFHYVDVGPRDGTPVLFLHGNPTSSYVWRNIIPHVAPTHRCIAPDLIGMGKSDKPDLGYFFDDHVRFMDAFIEALGLEEVVLVIHDWGSALGFHWAKRNPERVKGIAFMEFIRPIPTWDEWPEFARETFQAFRTTDVGRKLIIDQNVFIEGTLPMGVVRPLTEVEMDHYREPFLNPVDREPLWRFPNELPIAGEPANIVALVEEYMDWLHQSPVPKLLFWGTPGVLIPPAEAARLAKSLPNCKAVDIGPGLNLLQEDNPDLIGSEIATWLSTLEISG

SEQ ID NO: 2780 - protein, 277 aa, Synthetic construct
MFHYVDVGPRDGTPVLFLHGNPTSSYVWRNIIPHVAPTHRCIAPDLIGMGKSDKPDLGYFFDDHVRFMDAFIEALGLEEVVLVIHDWGSALGFHWAKRNPERVKGIAFMEFIRPIPTWDEWPEFARETFQAFRTTDVGRKLIIDQNVFIEGTLPMGVVRPLTEVEMDHYREPFLNPVDREPLWRFPNELPIAGEPANIVALVEEYMDWLHQSPVPKLLFWGTPGVLIPPAEAARLAKSLPNCKAVDIGPGLNLLQEDNPDLIGSEIAGWLSTLEISG

SEQ ID NO: 2781 - protein, 277 aa, Synthetic construct
MFHYVDVGPRDGTPVLFLHGNPTSSYVWRNIIPHVAPTHRCIAPDLIGMGKSDKPDLGYFFDDHVRFMDAFIEALGLEEVVLVIHDWGSALGFHWAKRNPERVKGIAFMEFIRPIPTWDEWPEFARETFQAFRTTDVGRKLIIDQNVFIEGTLPMGVVRPLTEVEMDHYREPFLNPVDREPLWRFPNELPIAGEPANIVALVEEYMDWLHQSPVPKLLFWGTPGVLIPPAEAARLAKSLPNCKAVDIGPGLNLLQEDNPDLIGSEIARFLSTLEISG

SEQ ID NO: 2782 - protein, 277 aa, Synthetic construct
MFHYVDVGPRDGTPVLFLHGNPTSSYVWRNIIPHVAPTHRCIAPDLIGMGKSDKPDLGYFFDDHVRFMDAFIEALGLEEVVLVIHDWGSALGFHWAKRNPERVKGIAFMEFIRPIPTWDEWPEFARETFQAFRTTDVGRKLIIDQNVFIEGTLPMGVVRPLTEVEMDHYREPFLNPVDREPLWRFPNELPIAGEPANIVALVEEYMDWLHQSPVPKLLFWGTPGVLIPPAEAARLAKSLPNCKAVDIGPGLNLLQEDNPDLIGSEIARYLSTLEISG

SEQ ID NO: 2783 - protein, 277 aa, Synthetic construct
MFHYVDVGPRDGTPVLFLHGNPTSSYVWRNIIPHVAPTHRCIAPDLIGMGKSDKPDLGYFFDDHVRFMDAFIEALGLEEVVLVIHDWGSALGFHWAKRNPERVKGIAFMEFIRPIPTWDEWPEFARETFQAFRTTDVGRKLIIDQNVFIEGTLPMGVVRPLTEVEMDHYREPFLNPVDREPLWRFPNELPIAGEPANIVALVEEYMDWLHQSPVPKLLFWGTPGVLIPPAEAARLAKSLPNCKAVDIGPGLNLLQEDNPDLIGSEIARLLSTLEISG

SEQ ID NO: 2784 - protein, 277 aa, Synthetic construct
MFHYVDVGPRDGTPVLFLHGNPTSSYVWRNIIPHVAPTHRCIAPDLIGMGKSDKPDLGYFFDDHVRFMDAFIEALGLEEVVLVIHDWGSALGFHWAKRNPERVKGIAFMEFIRPIPTWDEWPEFARETFQAFRTTDVGRKLIIDQNVFIEGTLPMGVVRPLTEVEMDHYREPFLNPVDREPLWRFPNELPIAGEPANIVALVEEYMDWLHQSPVPKLLFWGTPGVLIPPAEAARLAKSLPNCKAVDIGPGLNLLQEDNPDLIGSEIARHLSTLEISG

SEQ ID NO: 2785 - protein, 277 aa, Synthetic construct
MFHYVDVGPRDGTPVLFLHGNPTSSYVWRNIIPHVAPTHRCIAPDLIGMGKSDKPDLGYFFDDHVRFMDAFIEALGLEEVVLVIHDWGSALGFHWAKRNPERVKGIAFMEFIRPIPTWDEWPEFARETFQAFRTTDVGRKLIIDQNVFIEGTLPMGVVRPLTEVEMDHYREPFLNPVDREPLWRFPNELPIAGEPANIVALVEEYMDWLHQSPVPKLLFWGTPGVLIPPAEAARLAKSLPNCKAVDIGPGLNLLQEDNPDLIGSEIARVLSTLEISG

SEQ ID NO: 2786 - protein, 277 aa, Synthetic construct
MFHYVDVGPRDGTPVLFLHGNPTSSYVWRNIIPHVAPTHRCIAPDLIGMGKSDKPDLGYFFDDHVRFMDAFIEALGLEEVVLVIHDWGSALGFHWAKRNPERVKGIAFMEFIRPIPTWDEWPEFARETFQAFRTTDVGRKLIIDQNVFIEGTLPMGVVRPLTEVEMDHYREPFLNPVDREPLWRFPNELPIAGEPANIVALVEEYMDWLHQSPVPKLLFWGTPGVLIPPAEAARLAKSLPNCKAVDIGPGLNLLQEDNPDLIGSEIARMLSTLEISG

SEQ ID NO: 2787 - protein, 277 aa, Synthetic construct
MFHYVDVGPRDGTPVLFLHGNPTSSYVWRNIIPHVAPTHRCIAPDLIGMGKSDKPDLGYFFDDHVRFMDAFIEALGLEEVVLVIHDWGSALGFHWAKRNPERVKGIAFMEFIRPIPTWDEWPEFARETFQAFRTTDVGRKLIIDQNVFIEGTLPMGVVRPLTEVEMDHYREPFLNPVDREPLWRFPNELPIAGEPANIVALVEEYMDWLHQSPVPKLLFWGTPGVLIPPAEAARLAKSLPNCKAVDIGPGLNLLQEDNPDLIGSEIARWISTLEISG

SEQ ID NO: 2788 - protein, 277 aa, Synthetic construct
MFHYVDVGPRDGTPVLFLHGNPTSSYVWRNIIPHVAPTHRCIAPDLIGMGKSDKPDLGYFFDDHVRFMDAFIEALGLEEVVLVIHDWGSALGFHWAKRNPERVKGIAFMEFIRPIPTWDEWPEFARETFQAFRTTDVGRKLIIDQNVFIEGTLPMGVVRPLTEVEMDHYREPFLNPVDREPLWRFPNELPIAGEPANIVALVEEYMDWLHQSPVPKLLFWGTPGVLIPPAEAARLAKSLPNCKAVDIGPGLNLLQEDNPDLIGSEIARWVSTLEISG

SEQ ID NO: 2789 - protein, 277 aa, Synthetic construct
MFHYVDVGPRDGTPVLFLHGNPTSSYVWRNIIPHVAPTHRCIAPDLIGMGKSDKPDLGYFFDDHVRFMDAFIEALGLEEVVLVIHDWGSALGFHWAKRNPERVKGIAFMEFIRPIPTWDEWPEFARETFQAFRTTDVGRKLIIDQNVFIEGTLPMGVVRPLTEVEMDHYREPFLNPVDREPLWRFPNELPIAGEPANIVALVEEYMDWLHQSPVPKLLFWGTPGVLIPPAEAARLAKSLPNCKAVDIGPGLNLLQEDNPDLIGSEIARWFSTLEISG

SEQ ID NO: 2790 - protein, 277 aa, Synthetic construct
MFHYVDVGPRDGTPVLFLHGNPTSSYVWRNIIPHVAPTHRCIAPDLIGMGKSDKPDLGYFFDDHVRFMDAFIEALGLEEVVLVIHDWGSALGFHWAKRNPERVKGIAFMEFIRPIPTWDEWPEFARETFQAFRTTDVGRKLIIDQNVFIEGTLPMGVVRPLTEVEMDHYREPFLNPVDREPLWRFPNELPIAGEPANIVALVEEYMDWLHQSPVPKLLFWGTPGVLIPPAEAARLAKSLPNCKAVDIGPGLNLLQEDNPDLIGSEIARWMSTLEISG

SEQ ID NO: 2791 - protein, 277 aa, Synthetic construct
MFHYVDVGPRDGTPVLFLHGNPTSSYVWRNIIPHVAPTHRCIAPDLIGMGKSDKPDLGYFFDDHVRFMDAFIEALGLEEVVLVIHDWGSALGFHWAKRNPERVKGIAFMEFIRPIPTWDEWPEFARETFQAFRTTDVGRKLIIDQNVFIEGTLPMGVVRPLTEVEMDHYREPFLNPVDREPLWRFPNELPIAGEPANIVALVEEYMDWLHQSPVPKLLFWGTPGVLIPPAEAARLAKSLPNCKAVDIGPGLNLLQEDNPDLIGSEIARWASTLEISG

SEQ ID NO: 2792 - protein, 277 aa, Synthetic construct
MFHYVDVGPRDGTPVLFLHGNPTSSYVWRNIIPHVAPTHRCIAPDLIGMGKSDKPDLGYFFDDHVRFMDAFIEALGLEEVVLVIHDWGSALGFHWAKRNPERVKGIAFMEFIRPIPTWDEWPEFARETFQAFRTTDVGRKLIIDQNVFIEGTLPMGVVRPLTEVEMDHYREPFLNPVDREPLWRFPNELPIAGEPANIVALVEEYMDWLHQSPVPKLLFWGTPGVLIPPAEAARLAKSLPNCKAVDIGPGLNLLQEDNPDLIGSEIARWYSTLEISG

SEQ ID NO: 2793 - protein, 277 aa, Synthetic construct
MFHYVDVGPRDGTPVLFLHGNPTSSYVWRNIIPHVAPTHRCIAPDLIGMGKSDKPDLGYFFDDHVRFMDAFIEALGLEEVVLVIHDWGSALGFHWAKRNPERVKGIAFMEFIRPIPTWDEWPEFARETFQAFRTTDVGRKLIIDQNVFIEGTLPMGVVRPLTEVEMDHYREPFLNPVDREPLWRFPNELPIAGEPANIVALVEEYMDWLHQSPVPKLLFWGTPGVLIPPAEAARLAKSLPNCKAVDIGPGLNLLQEDNPDLIGSEIARWLATLEISG

SEQ ID NO: 2794 - protein, 277 aa, Synthetic construct
MFHYVDVGPRDGTPVLFLHGNPTSSYVWRNIIPHVAPTHRCIAPDLIGMGKSDKPDLGYFFDDHVRFMDAFIEALGLEEVVLVIHDWGSALGFHWAKRNPERVKGIAFMEFIRPIPTWDEWPEFARETFQAFRTTDVGRKLIIDQNVFIEGTLPMGVVRPLTEVEMDHYREPFLNPVDREPLWRFPNELPIAGEPANIVALVEEYMDWLHQSPVPKLLFWGTPGVLIPPAEAARLAKSLPNCKAVDIGPGLNLLQEDNPDLIGSEIARWLETLEISG

SEQ ID NO: 2795 - protein, 277 aa, Synthetic construct
MFHYVDVGPRDGTPVLFLHGNPTSSYVWRNIIPHVAPTHRCIAPDLIGMGKSDKPDLGYFFDDHVRFMDAFIEALGLEEVVLVIHDWGSALGFHWAKRNPERVKGIAFMEFIRPIPTWDEWPEFARETFQAFRTTDVGRKLIIDQNVFIEGTLPMGVVRPLTEVEMDHYREPFLNPVDREPLWRFPNELPIAGEPANIVALVEEYMDWLHQSPVPKLLFWGTPGVLIPPAEAARLAKSLPNCKAVDIGPGLNLLQEDNPDLIGSEIARWLGTLEISG

SEQ ID NO: 2796 - protein, 277 aa, Synthetic construct
MFHYVDVGPRDGTPVLFLHGNPTSSYVWRNIIPHVAPTHRCIAPDLIGMGKSDKPDLGYFFDDHVRFMDAFIEALGLEEVVLVIHDWGSALGFHWAKRNPERVKGIAFMEFIRPIPTWDEWPEFARETFQAFRTTDVGRKLIIDQNVFIEGTLPMGVVRPLTEVEMDHYREPFLNPVDREPLWRFPNELPIAGEPANIVALVEEYMDWLHQSPVPKLLFWGTPGVLIPPAEAARLAKSLPNCKAVDIGPGLNLLQEDNPDLIGSEIARWLDTLEISG

SEQ ID NO: 2797 - protein, 277 aa, Synthetic construct
MFHYVDVGPRDGTPVLFLHGNPTSSYVWRNIIPHVAPTHRCIAPDLIGMGKSDKPDLGYFFDDHVRFMDAFIEALGLEEVVLVIHDWGSALGFHWAKRNPERVKGIAFMEFIRPIPTWDEWPEFARETFQAFRTTDVGRKLIIDQNVFIEGTLPMGVVRPLTEVEMDHYREPFLNPVDREPLWRFPNELPIAGEPANIVALVEEYMDWLHQSPVPKLLFWGTPGVLIPPAEAARLAKSLPNCKAVDIGPGLNLLQEDNPDLIGSEIARWLKTLEISG

SEQ ID NO: 2798 - protein, 277 aa, Synthetic construct
MFHYVDVGPRDGTPVLFLHGNPTSSYVWRNIIPHVAPTHRCIAPDLIGMGKSDKPDLGYFFDDHVRFMDAFIEALGLEEVVLVIHDWGSALGFHWAKRNPERVKGIAFMEFIRPIPTWDEWPEFARETFQAFRTTDVGRKLIIDQNVFIEGTLPMGVVRPLTEVEMDHYREPFLNPVDREPLWRFPNELPIAGEPANIVALVEEYMDWLHQSPVPKLLFWGTPGVLIPPAEAARLAKSLPNCKAVDIGPGLNLLQEDNPDLIGSEIARWLRTLEISG

SEQ ID NO: 2799 - protein, 277 aa, Synthetic construct
MFHYVDVGPRDGTPVLFLHGNPTSSYVWRNIIPHVAPTHRCIAPDLIGMGKSDKPDLGYFFDDHVRFMDAFIEALGLEEVVLVIHDWGSALGFHWAKRNPERVKGIAFMEFIRPIPTWDEWPEFARETFQAFRTTDVGRKLIIDQNVFIEGTLPMGVVRPLTEVEMDHYREPFLNPVDREPLWRFPNELPIAGEPANIVALVEEYMDWLHQSPVPKLLFWGTPGVLIPPAEAARLAKSLPNCKAVDIGPGLNLLQEDNPDLIGSEIARWLSELEISG

SEQ ID NO: 2800 - protein, 277 aa, Synthetic construct
MFHYVDVGPRDGTPVLFLHGNPTSSYVWRNIIPHVAPTHRCIAPDLIGMGKSDKPDLGYFFDDHVRFMDAFIEALGLEEVVLVIHDWGSALGFHWAKRNPERVKGIAFMEFIRPIPTWDEWPEFARETFQAFRTTDVGRKLIIDQNVFIEGTLPMGVVRPLTEVEMDHYREPFLNPVDREPLWRFPNELPIAGEPANIVALVEEYMDWLHQSPVPKLLFWGTPGVLIPPAEAARLAKSLPNCKAVDIGPGLNLLQEDNPDLIGSEIARWLSSLEISG

SEQ ID NO: 2801 - protein, 277 aa, Synthetic construct
MFHYVDVGPRDGTPVLFLHGNPTSSYVWRNIIPHVAPTHRCIAPDLIGMGKSDKPDLGYFFDDHVRFMDAFIEALGLEEVVLVIHDWGSALGFHWAKRNPERVKGIAFMEFIRPIPTWDEWPEFARETFQAFRTTDVGRKLIIDQNVFIEGTLPMGVVRPLTEVEMDHYREPFLNPVDREPLWRFPNELPIAGEPANIVALVEEYMDWLHQSPVPKLLFWGTPGVLIPPAEAARLAKSLPNCKAVDIGPGLNLLQEDNPDLIGSEIARWLSGLEISG

SEQ ID NO: 2802 - protein, 277 aa, Synthetic construct
MFHYVDVGPRDGTPVLFLHGNPTSSYVWRNIIPHVAPTHRCIAPDLIGMGKSDKPDLGYFFDDHVRFMDAFIEALGLEEVVLVIHDWGSALGFHWAKRNPERVKGIAFMEFIRPIPTWDEWPEFARETFQAFRTTDVGRKLIIDQNVFIEGTLPMGVVRPLTEVEMDHYREPFLNPVDREPLWRFPNELPIAGEPANIVALVEEYMDWLHQSPVPKLLFWGTPGVLIPPAEAARLAKSLPNCKAVDIGPGLNLLQEDNPDLIGSEIARWLSDLEISG

SEQ ID NO: 2803 - protein, 277 aa, Synthetic construct
MFHYVDVGPRDGTPVLFLHGNPTSSYVWRNIIPHVAPTHRCIAPDLIGMGKSDKPDLGYFFDDHVRFMDAFIEALGLEEVVLVIHDWGSALGFHWAKRNPERVKGIAFMEFIRPIPTWDEWPEFARETFQAFRTTDVGRKLIIDQNVFIEGTLPMGVVRPLTEVEMDHYREPFLNPVDREPLWRFPNELPIAGEPANIVALVEEYMDWLHQSPVPKLLFWGTPGVLIPPAEAARLAKSLPNCKAVDIGPGLNLLQEDNPDLIGSEIARWLSALEISG

SEQ ID NO: 2804 - protein, 277 aa, Synthetic construct
MFHYVDVGPRDGTPVLFLHGNPTSSYVWRNIIPHVAPTHRCIAPDLIGMGKSDKPDLGYFFDDHVRFMDAFIEALGLEEVVLVIHDWGSALGFHWAKRNPERVKGIAFMEFIRPIPTWDEWPEFARETFQAFRTTDVGRKLIIDQNVFIEGTLPMGVVRPLTEVEMDHYREPFLNPVDREPLWRFPNELPIAGEPANIVALVEEYMDWLHQSPVPKLLFWGTPGVLIPPAEAARLAKSLPNCKAVDIGPGLNLLQEDNPDLIGSEIARWLSQLEISG

SEQ ID NO: 2805 - protein, 277 aa, Synthetic construct
MFHYVDVGPRDGTPVLFLHGNPTSSYVWRNIIPHVAPTHRCIAPDLIGMGKSDKPDLGYFFDDHVRFMDAFIEALGLEEVVLVIHDWGSALGFHWAKRNPERVKGIAFMEFIRPIPTWDEWPEFARETFQAFRTTDVGRKLIIDQNVFIEGTLPMGVVRPLTEVEMDHYREPFLNPVDREPLWRFPNELPIAGEPANIVALVEEYMDWLHQSPVPKLLFWGTPGVLIPPAEAARLAKSLPNCKAVDIGPGLNLLQEDNPDLIGSEIARWLSTIEISG

SEQ ID NO: 2806 - protein, 277 aa, Synthetic construct
MFHYVDVGPRDGTPVLFLHGNPTSSYVWRNIIPHVAPTHRCIAPDLIGMGKSDKPDLGYFFDDHVRFMDAFIEALGLEEVVLVIHDWGSALGFHWAKRNPERVKGIAFMEFIRPIPTWDEWPEFARETFQAFRTTDVGRKLIIDQNVFIEGTLPMGVVRPLTEVEMDHYREPFLNPVDREPLWRFPNELPIAGEPANIVALVEEYMDWLHQSPVPKLLFWGTPGVLIPPAEAARLAKSLPNCKAVDIGPGLNLLQEDNPDLIGSEIARWLSTVEISG

SEQ ID NO: 2807 - protein, 277 aa, Synthetic construct
MFHYVDVGPRDGTPVLFLHGNPTSSYVWRNIIPHVAPTHRCIAPDLIGMGKSDKPDLGYFFDDHVRFMDAFIEALGLEEVVLVIHDWGSALGFHWAKRNPERVKGIAFMEFIRPIPTWDEWPEFARETFQAFRTTDVGRKLIIDQNVFIEGTLPMGVVRPLTEVEMDHYREPFLNPVDREPLWRFPNELPIAGEPANIVALVEEYMDWLHQSPVPKLLFWGTPGVLIPPAEAARLAKSLPNCKAVDIGPGLNLLQEDNPDLIGSEIARWLSTQEISG

SEQ ID NO: 2808 - protein, 277 aa, Synthetic construct
MFHYVDVGPRDGTPVLFLHGNPTSSYVWRNIIPHVAPTHRCIAPDLIGMGKSDKPDLGYFFDDHVRFMDAFIEALGLEEVVLVIHDWGSALGFHWAKRNPERVKGIAFMEFIRPIPTWDEWPEFARETFQAFRTTDVGRKLIIDQNVFIEGTLPMGVVRPLTEVEMDHYREPFLNPVDREPLWRFPNELPIAGEPANIVALVEEYMDWLHQSPVPKLLFWGTPGVLIPPAEAARLAKSLPNCKAVDIGPGLNLLQEDNPDLIGSEIARWLSTHEISG

SEQ ID NO: 2809 - protein, 277 aa, Synthetic construct
MFHYVDVGPRDGTPVLFLHGNPTSSYVWRNIIPHVAPTHRCIAPDLIGMGKSDKPDLGYFFDDHVRFMDAFIEALGLEEVVLVIHDWGSALGFHWAKRNPERVKGIAFMEFIRPIPTWDEWPEFARETFQAFRTTDVGRKLIIDQNVFIEGTLPMGVVRPLTEVEMDHYREPFLNPVDREPLWRFPNELPIAGEPANIVALVEEYMDWLHQSPVPKLLFWGTPGVLIPPAEAARLAKSLPNCKAVDIGPGLNLLQEDNPDLIGSEIARWLSTTEISG

SEQ ID NO: 2810 - protein, 277 aa, Synthetic construct
MFHYVDVGPRDGTPVLFLHGNPTSSYVWRNIIPHVAPTHRCIAPDLIGMGKSDKPDLGYFFDDHVRFMDAFIEALGLEEVVLVIHDWGSALGFHWAKRNPERVKGIAFMEFIRPIPTWDEWPEFARETFQAFRTTDVGRKLIIDQNVFIEGTLPMGVVRPLTEVEMDHYREPFLNPVDREPLWRFPNELPIAGEPANIVALVEEYMDWLHQSPVPKLLFWGTPGVLIPPAEAARLAKSLPNCKAVDIGPGLNLLQEDNPDLIGSEIARWLSTAEISG

SEQ ID NO: 2811 - protein, 277 aa, Synthetic construct
MFHYVDVGPRDGTPVLFLHGNPTSSYVWRNIIPHVAPTHRCIAPDLIGMGKSDKPDLGYFFDDHVRFMDAFIEALGLEEVVLVIHDWGSALGFHWAKRNPERVKGIAFMEFIRPIPTWDEWPEFARETFQAFRTTDVGRKLIIDQNVFIEGTLPMGVVRPLTEVEMDHYREPFLNPVDREPLWRFPNELPIAGEPANIVALVEEYMDWLHQSPVPKLLFWGTPGVLIPPAEAARLAKSLPNCKAVDIGPGLNLLQEDNPDLIGSEIARWLSTLPISG

SEQ ID NO: 2812 - protein, 277 aa, Synthetic construct
MFHYVDVGPRDGTPVLFLHGNPTSSYVWRNIIPHVAPTHRCIAPDLIGMGKSDKPDLGYFFDDHVRFMDAFIEALGLEEVVLVIHDWGSALGFHWAKRNPERVKGIAFMEFIRPIPTWDEWPEFARETFQAFRTTDVGRKLIIDQNVFIEGTLPMGVVRPLTEVEMDHYREPFLNPVDREPLWRFPNELPIAGEPANIVALVEEYMDWLHQSPVPKLLFWGTPGVLIPPAEAARLAKSLPNCKAVDIGPGLNLLQEDNPDLIGSEIARWLSTLGISG

SEQ ID NO: 2813 - protein, 277 aa, Synthetic construct
MFHYVDVGPRDGTPVLFLHGNPTSSYVWRNIIPHVAPTHRCIAPDLIGMGKSDKPDLGYFFDDHVRFMDAFIEALGLEEVVLVIHDWGSALGFHWAKRNPERVKGIAFMEFIRPIPTWDEWPEFARETFQAFRTTDVGRKLIIDQNVFIEGTLPMGVVRPLTEVEMDHYREPFLNPVDREPLWRFPNELPIAGEPANIVALVEEYMDWLHQSPVPKLLFWGTPGVLIPPAEAARLAKSLPNCKAVDIGPGLNLLQEDNPDLIGSEIARWLSTLDISG

SEQ ID NO: 2814 - protein, 277 aa, Synthetic construct
MFHYVDVGPRDGTPVLFLHGNPTSSYVWRNIIPHVAPTHRCIAPDLIGMGKSDKPDLGYFFDDHVRFMDAFIEALGLEEVVLVIHDWGSALGFHWAKRNPERVKGIAFMEFIRPIPTWDEWPEFARETFQAFRTTDVGRKLIIDQNVFIEGTLPMGVVRPLTEVEMDHYREPFLNPVDREPLWRFPNELPIAGEPANIVALVEEYMDWLHQSPVPKLLFWGTPGVLIPPAEAARLAKSLPNCKAVDIGPGLNLLQEDNPDLIGSEIARWLSTLSISG

SEQ ID NO: 2815 - protein, 277 aa, Synthetic construct
MFHYVDVGPRDGTPVLFLHGNPTSSYVWRNIIPHVAPTHRCIAPDLIGMGKSDKPDLGYFFDDHVRFMDAFIEALGLEEVVLVIHDWGSALGFHWAKRNPERVKGIAFMEFIRPIPTWDEWPEFARETFQAFRTTDVGRKLIIDQNVFIEGTLPMGVVRPLTEVEMDHYREPFLNPVDREPLWRFPNELPIAGEPANIVALVEEYMDWLHQSPVPKLLFWGTPGVLIPPAEAARLAKSLPNCKAVDIGPGLNLLQEDNPDLIGSEIARWLSTLAISG

SEQ ID NO: 2816 - protein, 277 aa, Synthetic construct
MFHYVDVGPRDGTPVLFLHGNPTSSYVWRNIIPHVAPTHRCIAPDLIGMGKSDKPDLGYFFDDHVRFMDAFIEALGLEEVVLVIHDWGSALGFHWAKRNPERVKGIAFMEFIRPIPTWDEWPEFARETFQAFRTTDVGRKLIIDQNVFIEGTLPMGVVRPLTEVEMDHYREPFLNPVDREPLWRFPNELPIAGEPANIVALVEEYMDWLHQSPVPKLLFWGTPGVLIPPAEAARLAKSLPNCKAVDIGPGLNLLQEDNPDLIGSEIARWLSTLKISG

SEQ ID NO: 2817 - protein, 277 aa, Synthetic construct
MFHYVDVGPRDGTPVLFLHGNPTSSYVWRNIIPHVAPTHRCIAPDLIGMGKSDKPDLGYFFDDHVRFMDAFIEALGLEEVVLVIHDWGSALGFHWAKRNPERVKGIAFMEFIRPIPTWDEWPEFARETFQAFRTTDVGRKLIIDQNVFIEGTLPMGVVRPLTEVEMDHYREPFLNPVDREPLWRFPNELPIAGEPANIVALVEEYMDWLHQSPVPKLLFWGTPGVLIPPAEAARLAKSLPNCKAVDIGPGLNLLQEDNPDLIGSEIARWLSTLEASG

SEQ ID NO: 2818 - protein, 277 aa, Synthetic construct
MFHYVDVGPRDGTPVLFLHGNPTSSYVWRNIIPHVAPTHRCIAPDLIGMGKSDKPDLGYFFDDHVRFMDAFIEALGLEEVVLVIHDWGSALGFHWAKRNPERVKGIAFMEFIRPIPTWDEWPEFARETFQAFRTTDVGRKLIIDQNVFIEGTLPMGVVRPLTEVEMDHYREPFLNPVDREPLWRFPNELPIAGEPANIVALVEEYMDWLHQSPVPKLLFWGTPGVLIPPAEAARLAKSLPNCKAVDIGPGLNLLQEDNPDLIGSEIARWLSTLELSG

SEQ ID NO: 2819 - protein, 277 aa, Synthetic construct
MFHYVDVGPRDGTPVLFLHGNPTSSYVWRNIIPHVAPTHRCIAPDLIGMGKSDKPDLGYFFDDHVRFMDAFIEALGLEEVVLVIHDWGSALGFHWAKRNPERVKGIAFMEFIRPIPTWDEWPEFARETFQAFRTTDVGRKLIIDQNVFIEGTLPMGVVRPLTEVEMDHYREPFLNPVDREPLWRFPNELPIAGEPANIVALVEEYMDWLHQSPVPKLLFWGTPGVLIPPAEAARLAKSLPNCKAVDIGPGLNLLQEDNPDLIGSEIARWLSTLESSG

SEQ ID NO: 2820 - protein, 277 aa, Synthetic construct
MFHYVDVGPRDGTPVLFLHGNPTSSYVWRNIIPHVAPTHRCIAPDLIGMGKSDKPDLGYFFDDHVRFMDAFIEALGLEEVVLVIHDWGSALGFHWAKRNPERVKGIAFMEFIRPIPTWDEWPEFARETFQAFRTTDVGRKLIIDQNVFIEGTLPMGVVRPLTEVEMDHYREPFLNPVDREPLWRFPNELPIAGEPANIVALVEEYMDWLHQSPVPKLLFWGTPGVLIPPAEAARLAKSLPNCKAVDIGPGLNLLQEDNPDLIGSEIARWLSTLEPSG

SEQ ID NO: 2821 - protein, 277 aa, Synthetic construct
MFHYVDVGPRDGTPVLFLHGNPTSSYVWRNIIPHVAPTHRCIAPDLIGMGKSDKPDLGYFFDDHVRFMDAFIEALGLEEVVLVIHDWGSALGFHWAKRNPERVKGIAFMEFIRPIPTWDEWPEFARETFQAFRTTDVGRKLIIDQNVFIEGTLPMGVVRPLTEVEMDHYREPFLNPVDREPLWRFPNELPIAGEPANIVALVEEYMDWLHQSPVPKLLFWGTPGVLIPPAEAARLAKSLPNCKAVDIGPGLNLLQEDNPDLIGSEIARWLSTLEVSG

SEQ ID NO: 2822 - protein, 277 aa, Synthetic construct
MFHYVDVGPRDGTPVLFLHGNPTSSYVWRNIIPHVAPTHRCIAPDLIGMGKSDKPDLGYFFDDHVRFMDAFIEALGLEEVVLVIHDWGSALGFHWAKRNPERVKGIAFMEFIRPIPTWDEWPEFARETFQAFRTTDVGRKLIIDQNVFIEGTLPMGVVRPLTEVEMDHYREPFLNPVDREPLWRFPNELPIAGEPANIVALVEEYMDWLHQSPVPKLLFWGTPGVLIPPAEAARLAKSLPNCKAVDIGPGLNLLQEDNPDLIGSEIARWLSTLETSG

SEQ ID NO: 2823 - protein, 277 aa, Synthetic construct
MFHYVDVGPRDGTPVLFLHGNPTSSYVWRNIIPHVAPTHRCIAPDLIGMGKSDKPDLGYFFDDHVRFMDAFIEALGLEEVVLVIHDWGSALGFHWAKRNPERVKGIAFMEFIRPIPTWDEWPEFARETFQAFRTTDVGRKLIIDQNVFIEGTLPMGVVRPLTEVEMDHYREPFLNPVDREPLWRFPNELPIAGEPANIVALVEEYMDWLHQSPVPKLLFWGTPGVLIPPAEAARLAKSLPNCKAVDIGPGLNLLQEDNPDLIGSEIARWLSTLEIAG

SEQ ID NO: 2824 - protein, 277 aa, Synthetic construct
MFHYVDVGPRDGTPVLFLHGNPTSSYVWRNIIPHVAPTHRCIAPDLIGMGKSDKPDLGYFFDDHVRFMDAFIEALGLEEVVLVIHDWGSALGFHWAKRNPERVKGIAFMEFIRPIPTWDEWPEFARETFQAFRTTDVGRKLIIDQNVFIEGTLPMGVVRPLTEVEMDHYREPFLNPVDREPLWRFPNELPIAGEPANIVALVEEYMDWLHQSPVPKLLFWGTPGVLIPPAEAARLAKSLPNCKAVDIGPGLNLLQEDNPDLIGSEIARWLSTLEIGG

SEQ ID NO: 2825 - protein, 277 aa, Synthetic construct
MFHYVDVGPRDGTPVLFLHGNPTSSYVWRNIIPHVAPTHRCIAPDLIGMGKSDKPDLGYFFDDHVRFMDAFIEALGLEEVVLVIHDWGSALGFHWAKRNPERVKGIAFMEFIRPIPTWDEWPEFARETFQAFRTTDVGRKLIIDQNVFIEGTLPMGVVRPLTEVEMDHYREPFLNPVDREPLWRFPNELPIAGEPANIVALVEEYMDWLHQSPVPKLLFWGTPGVLIPPAEAARLAKSLPNCKAVDIGPGLNLLQEDNPDLIGSEIARWLSTLEIPG

SEQ ID NO: 2826 - protein, 277 aa, Synthetic construct
MFHYVDVGPRDGTPVLFLHGNPTSSYVWRNIIPHVAPTHRCIAPDLIGMGKSDKPDLGYFFDDHVRFMDAFIEALGLEEVVLVIHDWGSALGFHWAKRNPERVKGIAFMEFIRPIPTWDEWPEFARETFQAFRTTDVGRKLIIDQNVFIEGTLPMGVVRPLTEVEMDHYREPFLNPVDREPLWRFPNELPIAGEPANIVALVEEYMDWLHQSPVPKLLFWGTPGVLIPPAEAARLAKSLPNCKAVDIGPGLNLLQEDNPDLIGSEIARWLSTLEITG

SEQ ID NO: 2827 - protein, 277 aa, Synthetic construct
MFHYVDVGPRDGTPVLFLHGNPTSSYVWRNIIPHVAPTHRCIAPDLIGMGKSDKPDLGYFFDDHVRFMDAFIEALGLEEVVLVIHDWGSALGFHWAKRNPERVKGIAFMEFIRPIPTWDEWPEFARETFQAFRTTDVGRKLIIDQNVFIEGTLPMGVVRPLTEVEMDHYREPFLNPVDREPLWRFPNELPIAGEPANIVALVEEYMDWLHQSPVPKLLFWGTPGVLIPPAEAARLAKSLPNCKAVDIGPGLNLLQEDNPDLIGSEIARWLSTLEIRG

SEQ ID NO: 2828 - protein, 277 aa, Synthetic construct
MFHYVDVGPRDGTPVLFLHGNPTSSYVWRNIIPHVAPTHRCIAPDLIGMGKSDKPDLGYFFDDHVRFMDAFIEALGLEEVVLVIHDWGSALGFHWAKRNPERVKGIAFMEFIRPIPTWDEWPEFARETFQAFRTTDVGRKLIIDQNVFIEGTLPMGVVRPLTEVEMDHYREPFLNPVDREPLWRFPNELPIAGEPANIVALVEEYMDWLHQSPVPKLLFWGTPGVLIPPAEAARLAKSLPNCKAVDIGPGLNLLQEDNPDLIGSEIARWLSTLEIEG

SEQ ID NO: 2829 - protein, 277 aa, Synthetic construct
MFHYVDVGPRDGTPVLFLHGNPTSSYVWRNIIPHVAPTHRCIAPDLIGMGKSDKPDLGYFFDDHVRFMDAFIEALGLEEVVLVIHDWGSALGFHWAKRNPERVKGIAFMEFIRPIPTWDEWPEFARETFQAFRTTDVGRKLIIDQNVFIEGTLPMGVVRPLTEVEMDHYREPFLNPVDREPLWRFPNELPIAGEPANIVALVEEYMDWLHQSPVPKLLFWGTPGVLIPPAEAARLAKSLPNCKAVDIGPGLNLLQEDNPDLIGSEIARWLSTLEISA

SEQ ID NO: 2830 - protein, 277 aa, Synthetic construct
MFHYVDVGPRDGTPVLFLHGNPTSSYVWRNIIPHVAPTHRCIAPDLIGMGKSDKPDLGYFFDDHVRFMDAFIEALGLEEVVLVIHDWGSALGFHWAKRNPERVKGIAFMEFIRPIPTWDEWPEFARETFQAFRTTDVGRKLIIDQNVFIEGTLPMGVVRPLTEVEMDHYREPFLNPVDREPLWRFPNELPIAGEPANIVALVEEYMDWLHQSPVPKLLFWGTPGVLIPPAEAARLAKSLPNCKAVDIGPGLNLLQEDNPDLIGSEIARWLSTLEISS

SEQ ID NO: 2831 - protein, 277 aa, Synthetic construct
MFHYVDVGPRDGTPVLFLHGNPTSSYVWRNIIPHVAPTHRCIAPDLIGMGKSDKPDLGYFFDDHVRFMDAFIEALGLEEVVLVIHDWGSALGFHWAKRNPERVKGIAFMEFIRPIPTWDEWPEFARETFQAFRTTDVGRKLIIDQNVFIEGTLPMGVVRPLTEVEMDHYREPFLNPVDREPLWRFPNELPIAGEPANIVALVEEYMDWLHQSPVPKLLFWGTPGVLIPPAEAARLAKSLPNCKAVDIGPGLNLLQEDNPDLIGSEIARWLSTLEISR

SEQ ID NO: 2832 - protein, 277 aa, Synthetic construct
MFHYVDVGPRDGTPVLFLHGNPTSSYVWRNIIPHVAPTHRCIAPDLIGMGKSDKPDLGYFFDDHVRFMDAFIEALGLEEVVLVIHDWGSALGFHWAKRNPERVKGIAFMEFIRPIPTWDEWPEFARETFQAFRTTDVGRKLIIDQNVFIEGTLPMGVVRPLTEVEMDHYREPFLNPVDREPLWRFPNELPIAGEPANIVALVEEYMDWLHQSPVPKLLFWGTPGVLIPPAEAARLAKSLPNCKAVDIGPGLNLLQEDNPDLIGSEIARWLSTLEIST

SEQ ID NO: 2833 - protein, 277 aa, Synthetic construct
MFHYVDVGPRDGTPVLFLHGNPTSSYVWRNIIPHVAPTHRCIAPDLIGMGKSDKPDLGYFFDDHVRFMDAFIEALGLEEVVLVIHDWGSALGFHWAKRNPERVKGIAFMEFIRPIPTWDEWPEFARETFQAFRTTDVGRKLIIDQNVFIEGTLPMGVVRPLTEVEMDHYREPFLNPVDREPLWRFPNELPIAGEPANIVALVEEYMDWLHQSPVPKLLFWGTPGVLIPPAEAARLAKSLPNCKAVDIGPGLNLLQEDNPDLIGSEIARWLSTLEISP

SEQ ID NO: 2834 - protein, 277 aa, Synthetic construct
MFHYVDVGPRDGTPVLFLHGNPTSSYVWRNIIPHVAPTHRCIAPDLIGMGKSDKPDLGYFFDDHVRFMDAFIEALGLEEVVLVIHDWGSALGFHWAKRNPERVKGIAFMEFIRPIPTWDEWPEFARETFQAFRTTDVGRKLIIDQNVFIEGTLPMGVVRPLTEVEMDHYREPFLNPVDREPLWRFPNELPIAGEPANIVALVEEYMDWLHQSPVPKLLFWGTPGVLIPPAEAARLAKSLPNCKAVDIGPGLNLLQEDNPDLIGSEIARWLSTLEISK

SEQ ID NO: 2835 - protein, 277 aa, Synthetic construct
MFHYVDEGPRDGTPVLFLHGNPTSSYVWRNIIPHVAPTHRCIAPDLIGMGKSDKPDLGYFFDDHVRFMDAFIEALGLEEVVLVIHDWGSALGFHWAKRNPERVKGIAFMEFIRPIPTWDEWPEFARETFQAFRTTDVGRKLIIDQNVFIEGTLPMGVVRPLTEVEMDHYREPFLNPADREPLWRFPNELPIAGEPANIVALVEEYMDWLHQSPVPKLLFWGTPGVLIPPAEAARLAKSLPNCKAVDIGPGLNLLQEDNPDLIGSEIARWLSTLEISG

SEQ ID NO: 2836 - protein, 277 aa, Synthetic construct
MFHYVDEGPRDGTPVLFLHGNPTSSYVWRNIIPHVAPTHRCIAPDLIGMGKSDKPDLGYFFDDHVRFMDAFIEALGLEEVVLVIHDWGSALGFHWAKRNPERVKGIAFMEFIRPIPTWDEWPEFARETFQAFRTTDVGRKLIIDQNVFIEGTLPMGVVRPLTEVEMDHYREPFLNPVDREPLWRFPNELPIAGEPANVVALVEEYMDWLHQSPVPKLLFWGTPGVLIPPAEAARLAKSLPNCKAVDIGPGLNLLQEDNPDLIGSEIARWLSTLEISG

SEQ ID NO: 2837 - protein, 277 aa, Synthetic construct
MFHYVDEGPRDGTPVLFLHGNPTSSYVWRNIIPHVAPTHRCIAPDLIGMGKSDKPDLGYFFDDHVRFMDAFIEALGLEEVVLVIHDWGSALGFHWAKRNPERVKGIAFMEFIRPIPTWDEWPEFARETFQAFRTTDVGRKLIIDQNVFIEGTLPMGVVRPLTEVEMDHYREPFLNPVDREPLWRFPNELPIAGEPANIVAIVEEYMDWLHQSPVPKLLFWGTPGVLIPPAEAARLAKSLPNCKAVDIGPGLNLLQEDNPDLIGSEIARWLSTLEISG

SEQ ID NO: 2838 - protein, 277 aa, Synthetic construct
MFHYVDEGPRDGTPVLFLHGNPTSSYVWRNIIPHVAPTHRCIAPDLIGMGKSDKPDLGYFFDDHVRFMDAFIEALGLEEVVLVIHDWGSALGFHWAKRNPERVKGIAFMEFIRPIPTWDEWPEFARETFQAFRTTDVGRKLIIDQNVFIEGTLPMGVVRPLTEVEMDHYREPFLNPVDREPLWRFPNELPIAGEPANIVALVDEYMDWLHQSPVPKLLFWGTPGVLIPPAEAARLAKSLPNCKAVDIGPGLNLLQEDNPDLIGSEIARWLSTLEISG

SEQ ID NO: 2839 - protein, 277 aa, Synthetic construct
MFHYVDEGPRDGTPVLFLHGNPTSSYVWRNIIPHVAPTHRCIAPDLIGMGKSDKPDLGYFFDDHVRFMDAFIEALGLEEVVLVIHDWGSALGFHWAKRNPERVKGIAFMEFIRPIPTWDEWPEFARETFQAFRTTDVGRKLIIDQNVFIEGTLPMGVVRPLTEVEMDHYREPFLNPVDREPLWRFPNELPIAGEPANIVALVEEYMDWLHTSPVPKLLFWGTPGVLIPPAEAARLAKSLPNCKAVDIGPGLNLLQEDNPDLIGSEIARWLSTLEISG

SEQ ID NO: 2840 - protein, 277 aa, Synthetic construct
MFHYVDEGPRDGTPVLFLHGNPTSSYVWRNIIPHVAPTHRCIAPDLIGMGKSDKPDLGYFFDDHVRFMDAFIEALGLEEVVLVIHDWGSALGFHWAKRNPERVKGIAFMEFIRPIPTWDEWPEFARETFQAFRTTDVGRKLIIDQNVFIEGTLPMGVVRPLTEVEMDHYREPFLNPVDREPLWRFPNELPIAGEPANIVALVEEYMDWLHQSPVPKLLFWGTPGVLIPPAEAARLAESLPNCKAVDIGPGLNLLQEDNPDLIGSEIARWLSTLEISG

SEQ ID NO: 2841 - protein, 277 aa, Synthetic construct
MFHYVDEGPRDGTPVLFLHGNPTSSYVWRNIIPHVAPTHRCIAPDLIGMGKSDKPDLGYFFDDHVRFMDAFIEALGLEEVVLVIHDWGSALGFHWAKRNPERVKGIAFMEFIRPIPTWDEWPEFARETFQAFRTTDVGRKLIIDQNVFIEGTLPMGVVRPLTEVEMDHYREPFLNPVDREPLWRFPNELPIAGEPANIVALVEEYMDWLHQSPVPKLLFWGTPGVLIPPAEAARLAKTLPNCKAVDIGPGLNLLQEDNPDLIGSEIARWLSTLEISG

SEQ ID NO: 2842 - protein, 277 aa, Synthetic construct
MFHYVDEGPRDGTPVLFLHGNPTSSYVWRNIIPHVAPTHRCIAPDLIGMGKSDKPDLGYFFDDHVRFMDAFIEALGLEEVVLVIHDWGSALGFHWAKRNPERVKGIAFMEFIRPIPTWDEWPEFARETFQAFRTTDVGRKLIIDQNVFIEGTLPMGVVRPLTEVEMDHYREPFLNPVDREPLWRFPNELPIAGEPANIVALVEEYMDWLHQSPVPKLLFWGTPGVLIPPAEAARLAKSLPNCKAVDVGPGLNLLQEDNPDLIGSEIARWLSTLEISG

SEQ ID NO: 2843 - protein, 277 aa, Synthetic construct
MFHYVDEGPRDGTPVLFLHGNPTSSYVWRNIIPHVAPTHRCIAPDLIGMGKSDKPDLGYFFDDHVRFMDAFIEALGLEEVVLVIHDWGSALGFHWAKRNPERVKGIAFMEFIRPIPTWDEWPEFARETFQAFRTTDVGRKLIIDQNVFIEGTLPMGVVRPLTEVEMDHYREPFLNPVDREPLWRFPNELPIAGEPANIVALVEEYMDWLHQSPVPKLLFWGTPGVLIPPAEAARLAKSLPNCKAVDIGPGLNLLQEDNPDLIGAEIARWLSTLEISG

SEQ ID NO: 2844 - protein, 277 aa, Synthetic construct
MFHYVDVGPRDGTPVLFLHGNPTSSYVWRNIIPHVSPTHRCIAPDLIGMGKSDKPDLGYFFDDHVRFMDAFIEALGLEEVVLVIHDWGSALGFHWAKRNPERVKGIAFMEFIRPIPTWDEWPEFARETFQAFRTTDVGRKLIIDQNVFIEGTLPMGVVRPLTEVEMDHYREPFLNPADREPLWRFPNELPIAGEPANIVALVEEYMDWLHQSPVPKLLFWGTPGVLIPPAEAARLAKSLPNCKAVDIGPGLNLLQEDNPDLIGSEIARWLSTLEISG

SEQ ID NO: 2845 - protein, 277 aa, Synthetic construct
MFHYVDVGPRDGTPVLFLHGNPTSSYVWRNIIPHVSPTHRCIAPDLIGMGKSDKPDLGYFFDDHVRFMDAFIEALGLEEVVLVIHDWGSALGFHWAKRNPERVKGIAFMEFIRPIPTWDEWPEFARETFQAFRTTDVGRKLIIDQNVFIEGTLPMGVVRPLTEVEMDHYREPFLNPVDREPLWRFPNELPIAGEPANVVALVEEYMDWLHQSPVPKLLFWGTPGVLIPPAEAARLAKSLPNCKAVDIGPGLNLLQEDNPDLIGSEIARWLSTLEISG

SEQ ID NO: 2846 - protein, 277 aa, Synthetic construct
MFHYVDVGPRDGTPVLFLHGNPTSSYVWRNIIPHVSPTHRCIAPDLIGMGKSDKPDLGYFFDDHVRFMDAFIEALGLEEVVLVIHDWGSALGFHWAKRNPERVKGIAFMEFIRPIPTWDEWPEFARETFQAFRTTDVGRKLIIDQNVFIEGTLPMGVVRPLTEVEMDHYREPFLNPVDREPLWRFPNELPIAGEPANIVAIVEEYMDWLHQSPVPKLLFWGTPGVLIPPAEAARLAKSLPNCKAVDIGPGLNLLQEDNPDLIGSEIARWLSTLEISG

SEQ ID NO: 2847 - protein, 277 aa, Synthetic construct
MFHYVDVGPRDGTPVLFLHGNPTSSYVWRNIIPHVSPTHRCIAPDLIGMGKSDKPDLGYFFDDHVRFMDAFIEALGLEEVVLVIHDWGSALGFHWAKRNPERVKGIAFMEFIRPIPTWDEWPEFARETFQAFRTTDVGRKLIIDQNVFIEGTLPMGVVRPLTEVEMDHYREPFLNPVDREPLWRFPNELPIAGEPANIVALVDEYMDWLHQSPVPKLLFWGTPGVLIPPAEAARLAKSLPNCKAVDIGPGLNLLQEDNPDLIGSEIARWLSTLEISG

SEQ ID NO: 2848 - protein, 277 aa, Synthetic construct
MFHYVDVGPRDGTPVLFLHGNPTSSYVWRNIIPHVSPTHRCIAPDLIGMGKSDKPDLGYFFDDHVRFMDAFIEALGLEEVVLVIHDWGSALGFHWAKRNPERVKGIAFMEFIRPIPTWDEWPEFARETFQAFRTTDVGRKLIIDQNVFIEGTLPMGVVRPLTEVEMDHYREPFLNPVDREPLWRFPNELPIAGEPANIVALVEEYMDWLHTSPVPKLLFWGTPGVLIPPAEAARLAKSLPNCKAVDIGPGLNLLQEDNPDLIGSEIARWLSTLEISG

SEQ ID NO: 2849 - protein, 277 aa, Synthetic construct
MFHYVDVGPRDGTPVLFLHGNPTSSYVWRNIIPHVSPTHRCIAPDLIGMGKSDKPDLGYFFDDHVRFMDAFIEALGLEEVVLVIHDWGSALGFHWAKRNPERVKGIAFMEFIRPIPTWDEWPEFARETFQAFRTTDVGRKLIIDQNVFIEGTLPMGVVRPLTEVEMDHYREPFLNPVDREPLWRFPNELPIAGEPANIVALVEEYMDWLHQSPVPKLLFWGTPGVLIPPAEAARLAESLPNCKAVDIGPGLNLLQEDNPDLIGSEIARWLSTLEISG

SEQ ID NO: 2850 - protein, 277 aa, Synthetic construct
MFHYVDVGPRDGTPVLFLHGNPTSSYVWRNIIPHVSPTHRCIAPDLIGMGKSDKPDLGYFFDDHVRFMDAFIEALGLEEVVLVIHDWGSALGFHWAKRNPERVKGIAFMEFIRPIPTWDEWPEFARETFQAFRTTDVGRKLIIDQNVFIEGTLPMGVVRPLTEVEMDHYREPFLNPVDREPLWRFPNELPIAGEPANIVALVEEYMDWLHQSPVPKLLFWGTPGVLIPPAEAARLAKTLPNCKAVDIGPGLNLLQEDNPDLIGSEIARWLSTLEISG

SEQ ID NO: 2851 - protein, 277 aa, Synthetic construct
MFHYVDVGPRDGTPVLFLHGNPTSSYVWRNIIPHVSPTHRCIAPDLIGMGKSDKPDLGYFFDDHVRFMDAFIEALGLEEVVLVIHDWGSALGFHWAKRNPERVKGIAFMEFIRPIPTWDEWPEFARETFQAFRTTDVGRKLIIDQNVFIEGTLPMGVVRPLTEVEMDHYREPFLNPVDREPLWRFPNELPIAGEPANIVALVEEYMDWLHQSPVPKLLFWGTPGVLIPPAEAARLAKSLPNCKAVDVGPGLNLLQEDNPDLIGSEIARWLSTLEISG

SEQ ID NO: 2852 - protein, 277 aa, Synthetic construct
MFHYVDVGPRDGTPVLFLHGNPTSSYVWRNIIPHVSPTHRCIAPDLIGMGKSDKPDLGYFFDDHVRFMDAFIEALGLEEVVLVIHDWGSALGFHWAKRNPERVKGIAFMEFIRPIPTWDEWPEFARETFQAFRTTDVGRKLIIDQNVFIEGTLPMGVVRPLTEVEMDHYREPFLNPVDREPLWRFPNELPIAGEPANIVALVEEYMDWLHQSPVPKLLFWGTPGVLIPPAEAARLAKSLPNCKAVDIGPGLNLLQEDNPDLIGAEIARWLSTLEISG

SEQ ID NO: 2853 - protein, 277 aa, Synthetic construct
MFHYVDVGPRDGTPVLFLHGNPTSSYVWRNIIPHVAPTHRCIAPDLIGFGKSDKPDLGYFFDDHVRFMDAFIEALGLEEVVLVIHDWGSALGFHWAKRNPERVKGIAFMEFIRPIPTWDEWPEFARETFQAFRTTDVGRKLIIDQNVFIEGTLPMGVVRPLTEVEMDHYREPFLNPADREPLWRFPNELPIAGEPANIVALVEEYMDWLHQSPVPKLLFWGTPGVLIPPAEAARLAKSLPNCKAVDIGPGLNLLQEDNPDLIGSEIARWLSTLEISG

SEQ ID NO: 2854 - protein, 277 aa, Synthetic construct
MFHYVDVGPRDGTPVLFLHGNPTSSYVWRNIIPHVAPTHRCIAPDLIGFGKSDKPDLGYFFDDHVRFMDAFIEALGLEEVVLVIHDWGSALGFHWAKRNPERVKGIAFMEFIRPIPTWDEWPEFARETFQAFRTTDVGRKLIIDQNVFIEGTLPMGVVRPLTEVEMDHYREPFLNPVDREPLWRFPNELPIAGEPANVVALVEEYMDWLHQSPVPKLLFWGTPGVLIPPAEAARLAKSLPNCKAVDIGPGLNLLQEDNPDLIGSEIARWLSTLEISG

SEQ ID NO: 2855 - protein, 277 aa, Synthetic construct
MFHYVDVGPRDGTPVLFLHGNPTSSYVWRNIIPHVAPTHRCIAPDLIGFGKSDKPDLGYFFDDHVRFMDAFIEALGLEEVVLVIHDWGSALGFHWAKRNPERVKGIAFMEFIRPIPTWDEWPEFARETFQAFRTTDVGRKLIIDQNVFIEGTLPMGVVRPLTEVEMDHYREPFLNPVDREPLWRFPNELPIAGEPANIVAIVEEYMDWLHQSPVPKLLFWGTPGVLIPPAEAARLAKSLPNCKAVDIGPGLNLLQEDNPDLIGSEIARWLSTLEISG

SEQ ID NO: 2856 - protein, 277 aa, Synthetic construct
MFHYVDVGPRDGTPVLFLHGNPTSSYVWRNIIPHVAPTHRCIAPDLIGFGKSDKPDLGYFFDDHVRFMDAFIEALGLEEVVLVIHDWGSALGFHWAKRNPERVKGIAFMEFIRPIPTWDEWPEFARETFQAFRTTDVGRKLIIDQNVFIEGTLPMGVVRPLTEVEMDHYREPFLNPVDREPLWRFPNELPIAGEPANIVALVDEYMDWLHQSPVPKLLFWGTPGVLIPPAEAARLAKSLPNCKAVDIGPGLNLLQEDNPDLIGSEIARWLSTLEISG

SEQ ID NO: 2857 - protein, 277 aa, Synthetic construct
MFHYVDVGPRDGTPVLFLHGNPTSSYVWRNIIPHVAPTHRCIAPDLIGFGKSDKPDLGYFFDDHVRFMDAFIEALGLEEVVLVIHDWGSALGFHWAKRNPERVKGIAFMEFIRPIPTWDEWPEFARETFQAFRTTDVGRKLIIDQNVFIEGTLPMGVVRPLTEVEMDHYREPFLNPVDREPLWRFPNELPIAGEPANIVALVEEYMDWLHTSPVPKLLFWGTPGVLIPPAEAARLAKSLPNCKAVDIGPGLNLLQEDNPDLIGSEIARWLSTLEISG

SEQ ID NO: 2858 - protein, 277 aa, Synthetic construct
MFHYVDVGPRDGTPVLFLHGNPTSSYVWRNIIPHVAPTHRCIAPDLIGFGKSDKPDLGYFFDDHVRFMDAFIEALGLEEVVLVIHDWGSALGFHWAKRNPERVKGIAFMEFIRPIPTWDEWPEFARETFQAFRTTDVGRKLIIDQNVFIEGTLPMGVVRPLTEVEMDHYREPFLNPVDREPLWRFPNELPIAGEPANIVALVEEYMDWLHQSPVPKLLFWGTPGVLIPPAEAARLAESLPNCKAVDIGPGLNLLQEDNPDLIGSEIARWLSTLEISG

SEQ ID NO: 2859 - protein, 277 aa, Synthetic construct
MFHYVDVGPRDGTPVLFLHGNPTSSYVWRNIIPHVAPTHRCIAPDLIGFGKSDKPDLGYFFDDHVRFMDAFIEALGLEEVVLVIHDWGSALGFHWAKRNPERVKGIAFMEFIRPIPTWDEWPEFARETFQAFRTTDVGRKLIIDQNVFIEGTLPMGVVRPLTEVEMDHYREPFLNPVDREPLWRFPNELPIAGEPANIVALVEEYMDWLHQSPVPKLLFWGTPGVLIPPAEAARLAKTLPNCKAVDIGPGLNLLQEDNPDLIGSEIARWLSTLEISG

SEQ ID NO: 2860 - protein, 277 aa, Synthetic construct
MFHYVDVGPRDGTPVLFLHGNPTSSYVWRNIIPHVAPTHRCIAPDLIGFGKSDKPDLGYFFDDHVRFMDAFIEALGLEEVVLVIHDWGSALGFHWAKRNPERVKGIAFMEFIRPIPTWDEWPEFARETFQAFRTTDVGRKLIIDQNVFIEGTLPMGVVRPLTEVEMDHYREPFLNPVDREPLWRFPNELPIAGEPANIVALVEEYMDWLHQSPVPKLLFWGTPGVLIPPAEAARLAKSLPNCKAVDVGPGLNLLQEDNPDLIGSEIARWLSTLEISG

SEQ ID NO: 2861 - protein, 277 aa, Synthetic construct
MFHYVDVGPRDGTPVLFLHGNPTSSYVWRNIIPHVAPTHRCIAPDLIGFGKSDKPDLGYFFDDHVRFMDAFIEALGLEEVVLVIHDWGSALGFHWAKRNPERVKGIAFMEFIRPIPTWDEWPEFARETFQAFRTTDVGRKLIIDQNVFIEGTLPMGVVRPLTEVEMDHYREPFLNPVDREPLWRFPNELPIAGEPANIVALVEEYMDWLHQSPVPKLLFWGTPGVLIPPAEAARLAKSLPNCKAVDIGPGLNLLQEDNPDLIGAEIARWLSTLEISG

SEQ ID NO: 2862 - protein, 277 aa, Synthetic construct
MFHYVDVGPRDGTPVLFLHGNPTSSYVWRNIIPHVAPTHRCIAPDLIGMGKSGKPDLGYFFDDHVRFMDAFIEALGLEEVVLVIHDWGSALGFHWAKRNPERVKGIAFMEFIRPIPTWDEWPEFARETFQAFRTTDVGRKLIIDQNVFIEGTLPMGVVRPLTEVEMDHYREPFLNPADREPLWRFPNELPIAGEPANIVALVEEYMDWLHQSPVPKLLFWGTPGVLIPPAEAARLAKSLPNCKAVDIGPGLNLLQEDNPDLIGSEIARWLSTLEISG

SEQ ID NO: 2863 - protein, 277 aa, Synthetic construct
MFHYVDVGPRDGTPVLFLHGNPTSSYVWRNIIPHVAPTHRCIAPDLIGMGKSGKPDLGYFFDDHVRFMDAFIEALGLEEVVLVIHDWGSALGFHWAKRNPERVKGIAFMEFIRPIPTWDEWPEFARETFQAFRTTDVGRKLIIDQNVFIEGTLPMGVVRPLTEVEMDHYREPFLNPVDREPLWRFPNELPIAGEPANVVALVEEYMDWLHQSPVPKLLFWGTPGVLIPPAEAARLAKSLPNCKAVDIGPGLNLLQEDNPDLIGSEIARWLSTLEISG

SEQ ID NO: 2864 - protein, 277 aa, Synthetic construct
MFHYVDVGPRDGTPVLFLHGNPTSSYVWRNIIPHVAPTHRCIAPDLIGMGKSGKPDLGYFFDDHVRFMDAFIEALGLEEVVLVIHDWGSALGFHWAKRNPERVKGIAFMEFIRPIPTWDEWPEFARETFQAFRTTDVGRKLIIDQNVFIEGTLPMGVVRPLTEVEMDHYREPFLNPVDREPLWRFPNELPIAGEPANIVAIVEEYMDWLHQSPVPKLLFWGTPGVLIPPAEAARLAKSLPNCKAVDIGPGLNLLQEDNPDLIGSEIARWLSTLEISG

SEQ ID NO: 2865 - protein, 277 aa, Synthetic construct
MFHYVDVGPRDGTPVLFLHGNPTSSYVWRNIIPHVAPTHRCIAPDLIGMGKSGKPDLGYFFDDHVRFMDAFIEALGLEEVVLVIHDWGSALGFHWAKRNPERVKGIAFMEFIRPIPTWDEWPEFARETFQAFRTTDVGRKLIIDQNVFIEGTLPMGVVRPLTEVEMDHYREPFLNPVDREPLWRFPNELPIAGEPANIVALVDEYMDWLHQSPVPKLLFWGTPGVLIPPAEAARLAKSLPNCKAVDIGPGLNLLQEDNPDLIGSEIARWLSTLEISG

SEQ ID NO: 2866 - protein, 277 aa, Synthetic construct
MFHYVDVGPRDGTPVLFLHGNPTSSYVWRNIIPHVAPTHRCIAPDLIGMGKSGKPDLGYFFDDHVRFMDAFIEALGLEEVVLVIHDWGSALGFHWAKRNPERVKGIAFMEFIRPIPTWDEWPEFARETFQAFRTTDVGRKLIIDQNVFIEGTLPMGVVRPLTEVEMDHYREPFLNPVDREPLWRFPNELPIAGEPANIVALVEEYMDWLHTSPVPKLLFWGTPGVLIPPAEAARLAKSLPNCKAVDIGPGLNLLQEDNPDLIGSEIARWLSTLEISG

SEQ ID NO: 2867 - protein, 277 aa, Synthetic construct
MFHYVDVGPRDGTPVLFLHGNPTSSYVWRNIIPHVAPTHRCIAPDLIGMGKSGKPDLGYFFDDHVRFMDAFIEALGLEEVVLVIHDWGSALGFHWAKRNPERVKGIAFMEFIRPIPTWDEWPEFARETFQAFRTTDVGRKLIIDQNVFIEGTLPMGVVRPLTEVEMDHYREPFLNPVDREPLWRFPNELPIAGEPANIVALVEEYMDWLHQSPVPKLLFWGTPGVLIPPAEAARLAESLPNCKAVDIGPGLNLLQEDNPDLIGSEIARWLSTLEISG

SEQ ID NO: 2868 - protein, 277 aa, Synthetic construct
MFHYVDVGPRDGTPVLFLHGNPTSSYVWRNIIPHVAPTHRCIAPDLIGMGKSGKPDLGYFFDDHVRFMDAFIEALGLEEVVLVIHDWGSALGFHWAKRNPERVKGIAFMEFIRPIPTWDEWPEFARETFQAFRTTDVGRKLIIDQNVFIEGTLPMGVVRPLTEVEMDHYREPFLNPVDREPLWRFPNELPIAGEPANIVALVEEYMDWLHQSPVPKLLFWGTPGVLIPPAEAARLAKTLPNCKAVDIGPGLNLLQEDNPDLIGSEIARWLSTLEISG

SEQ ID NO: 2869 - protein, 277 aa, Synthetic construct
MFHYVDVGPRDGTPVLFLHGNPTSSYVWRNIIPHVAPTHRCIAPDLIGMGKSGKPDLGYFFDDHVRFMDAFIEALGLEEVVLVIHDWGSALGFHWAKRNPERVKGIAFMEFIRPIPTWDEWPEFARETFQAFRTTDVGRKLIIDQNVFIEGTLPMGVVRPLTEVEMDHYREPFLNPVDREPLWRFPNELPIAGEPANIVALVEEYMDWLHQSPVPKLLFWGTPGVLIPPAEAARLAKSLPNCKAVDVGPGLNLLQEDNPDLIGSEIARWLSTLEISG

SEQ ID NO: 2870 - protein, 277 aa, Synthetic construct
MFHYVDVGPRDGTPVLFLHGNPTSSYVWRNIIPHVAPTHRCIAPDLIGMGKSGKPDLGYFFDDHVRFMDAFIEALGLEEVVLVIHDWGSALGFHWAKRNPERVKGIAFMEFIRPIPTWDEWPEFARETFQAFRTTDVGRKLIIDQNVFIEGTLPMGVVRPLTEVEMDHYREPFLNPVDREPLWRFPNELPIAGEPANIVALVEEYMDWLHQSPVPKLLFWGTPGVLIPPAEAARLAKSLPNCKAVDIGPGLNLLQEDNPDLIGAEIARWLSTLEISG

SEQ ID NO: 2871 - protein, 277 aa, Synthetic construct
MFHYVDVGPRDGTPVLFLHGNPTSSYVWRNIIPHVAPTHRCIAPDLIGMGKSDKPDIGYFFDDHVRFMDAFIEALGLEEVVLVIHDWGSALGFHWAKRNPERVKGIAFMEFIRPIPTWDEWPEFARETFQAFRTTDVGRKLIIDQNVFIEGTLPMGVVRPLTEVEMDHYREPFLNPADREPLWRFPNELPIAGEPANIVALVEEYMDWLHQSPVPKLLFWGTPGVLIPPAEAARLAKSLPNCKAVDIGPGLNLLQEDNPDLIGSEIARWLSTLEISG

SEQ ID NO: 2872 - protein, 277 aa, Synthetic construct
MFHYVDVGPRDGTPVLFLHGNPTSSYVWRNIIPHVAPTHRCIAPDLIGMGKSDKPDIGYFFDDHVRFMDAFIEALGLEEVVLVIHDWGSALGFHWAKRNPERVKGIAFMEFIRPIPTWDEWPEFARETFQAFRTTDVGRKLIIDQNVFIEGTLPMGVVRPLTEVEMDHYREPFLNPVDREPLWRFPNELPIAGEPANVVALVEEYMDWLHQSPVPKLLFWGTPGVLIPPAEAARLAKSLPNCKAVDIGPGLNLLQEDNPDLIGSEIARWLSTLEISG

SEQ ID NO: 2873 - protein, 277 aa, Synthetic construct
MFHYVDVGPRDGTPVLFLHGNPTSSYVWRNIIPHVAPTHRCIAPDLIGMGKSDKPDIGYFFDDHVRFMDAFIEALGLEEVVLVIHDWGSALGFHWAKRNPERVKGIAFMEFIRPIPTWDEWPEFARETFQAFRTTDVGRKLIIDQNVFIEGTLPMGVVRPLTEVEMDHYREPFLNPVDREPLWRFPNELPIAGEPANIVAIVEEYMDWLHQSPVPKLLFWGTPGVLIPPAEAARLAKSLPNCKAVDIGPGLNLLQEDNPDLIGSEIARWLSTLEISG

SEQ ID NO: 2874 - protein, 277 aa, Synthetic construct
MFHYVDVGPRDGTPVLFLHGNPTSSYVWRNIIPHVAPTHRCIAPDLIGMGKSDKPDIGYFFDDHVRFMDAFIEALGLEEVVLVIHDWGSALGFHWAKRNPERVKGIAFMEFIRPIPTWDEWPEFARETFQAFRTTDVGRKLIIDQNVFIEGTLPMGVVRPLTEVEMDHYREPFLNPVDREPLWRFPNELPIAGEPANIVALVDEYMDWLHQSPVPKLLFWGTPGVLIPPAEAARLAKSLPNCKAVDIGPGLNLLQEDNPDLIGSEIARWLSTLEISG

SEQ ID NO: 2875 - protein, 277 aa, Synthetic construct
MFHYVDVGPRDGTPVLFLHGNPTSSYVWRNIIPHVAPTHRCIAPDLIGMGKSDKPDIGYFFDDHVRFMDAFIEALGLEEVVLVIHDWGSALGFHWAKRNPERVKGIAFMEFIRPIPTWDEWPEFARETFQAFRTTDVGRKLIIDQNVFIEGTLPMGVVRPLTEVEMDHYREPFLNPVDREPLWRFPNELPIAGEPANIVALVEEYMDWLHTSPVPKLLFWGTPGVLIPPAEAARLAKSLPNCKAVDIGPGLNLLQEDNPDLIGSEIARWLSTLEISG

SEQ ID NO: 2876 - protein, 277 aa, Synthetic construct
MFHYVDVGPRDGTPVLFLHGNPTSSYVWRNIIPHVAPTHRCIAPDLIGMGKSDKPDIGYFFDDHVRFMDAFIEALGLEEVVLVIHDWGSALGFHWAKRNPERVKGIAFMEFIRPIPTWDEWPEFARETFQAFRTTDVGRKLIIDQNVFIEGTLPMGVVRPLTEVEMDHYREPFLNPVDREPLWRFPNELPIAGEPANIVALVEEYMDWLHQSPVPKLLFWGTPGVLIPPAEAARLAESLPNCKAVDIGPGLNLLQEDNPDLIGSEIARWLSTLEISG

SEQ ID NO: 2877 - protein, 277 aa, Synthetic construct
MFHYVDVGPRDGTPVLFLHGNPTSSYVWRNIIPHVAPTHRCIAPDLIGMGKSDKPDIGYFFDDHVRFMDAFIEALGLEEVVLVIHDWGSALGFHWAKRNPERVKGIAFMEFIRPIPTWDEWPEFARETFQAFRTTDVGRKLIIDQNVFIEGTLPMGVVRPLTEVEMDHYREPFLNPVDREPLWRFPNELPIAGEPANIVALVEEYMDWLHQSPVPKLLFWGTPGVLIPPAEAARLAKTLPNCKAVDIGPGLNLLQEDNPDLIGSEIARWLSTLEISG

SEQ ID NO: 2878 - protein, 277 aa, Synthetic construct
MFHYVDVGPRDGTPVLFLHGNPTSSYVWRNIIPHVAPTHRCIAPDLIGMGKSDKPDIGYFFDDHVRFMDAFIEALGLEEVVLVIHDWGSALGFHWAKRNPERVKGIAFMEFIRPIPTWDEWPEFARETFQAFRTTDVGRKLIIDQNVFIEGTLPMGVVRPLTEVEMDHYREPFLNPVDREPLWRFPNELPIAGEPANIVALVEEYMDWLHQSPVPKLLFWGTPGVLIPPAEAARLAKSLPNCKAVDVGPGLNLLQEDNPDLIGSEIARWLSTLEISG

SEQ ID NO: 2879 - protein, 277 aa, Synthetic construct
MFHYVDVGPRDGTPVLFLHGNPTSSYVWRNIIPHVAPTHRCIAPDLIGMGKSDKPDIGYFFDDHVRFMDAFIEALGLEEVVLVIHDWGSALGFHWAKRNPERVKGIAFMEFIRPIPTWDEWPEFARETFQAFRTTDVGRKLIIDQNVFIEGTLPMGVVRPLTEVEMDHYREPFLNPVDREPLWRFPNELPIAGEPANIVALVEEYMDWLHQSPVPKLLFWGTPGVLIPPAEAARLAKSLPNCKAVDIGPGLNLLQEDNPDLIGAEIARWLSTLEISG

SEQ ID NO: 2880 - protein, 277 aa, Synthetic construct
MFHYVDVGPRDGTPVLFLHGNPTSSYVWRNIIPHVAPTHRCIAPDLIGMGKSDKPDLGYFFDDHVRFMDAFIEALGLEEVVLVVHDWGSALGFHWAKRNPERVKGIAFMEFIRPIPTWDEWPEFARETFQAFRTTDVGRKLIIDQNVFIEGTLPMGVVRPLTEVEMDHYREPFLNPADREPLWRFPNELPIAGEPANIVALVEEYMDWLHQSPVPKLLFWGTPGVLIPPAEAARLAKSLPNCKAVDIGPGLNLLQEDNPDLIGSEIARWLSTLEISG

SEQ ID NO: 2881 - protein, 277 aa, Synthetic construct
MFHYVDVGPRDGTPVLFLHGNPTSSYVWRNIIPHVAPTHRCIAPDLIGMGKSDKPDLGYFFDDHVRFMDAFIEALGLEEVVLVVHDWGSALGFHWAKRNPERVKGIAFMEFIRPIPTWDEWPEFARETFQAFRTTDVGRKLIIDQNVFIEGTLPMGVVRPLTEVEMDHYREPFLNPVDREPLWRFPNELPIAGEPANVVALVEEYMDWLHQSPVPKLLFWGTPGVLIPPAEAARLAKSLPNCKAVDIGPGLNLLQEDNPDLIGSEIARWLSTLEISG

SEQ ID NO: 2882 - protein, 277 aa, Synthetic construct
MFHYVDVGPRDGTPVLFLHGNPTSSYVWRNIIPHVAPTHRCIAPDLIGMGKSDKPDLGYFFDDHVRFMDAFIEALGLEEVVLVVHDWGSALGFHWAKRNPERVKGIAFMEFIRPIPTWDEWPEFARETFQAFRTTDVGRKLIIDQNVFIEGTLPMGVVRPLTEVEMDHYREPFLNPVDREPLWRFPNELPIAGEPANIVAIVEEYMDWLHQSPVPKLLFWGTPGVLIPPAEAARLAKSLPNCKAVDIGPGLNLLQEDNPDLIGSEIARWLSTLEISG

SEQ ID NO: 2883 - protein, 277 aa, Synthetic construct
MFHYVDVGPRDGTPVLFLHGNPTSSYVWRNIIPHVAPTHRCIAPDLIGMGKSDKPDLGYFFDDHVRFMDAFIEALGLEEVVLVVHDWGSALGFHWAKRNPERVKGIAFMEFIRPIPTWDEWPEFARETFQAFRTTDVGRKLIIDQNVFIEGTLPMGVVRPLTEVEMDHYREPFLNPVDREPLWRFPNELPIAGEPANIVALVDEYMDWLHQSPVPKLLFWGTPGVLIPPAEAARLAKSLPNCKAVDIGPGLNLLQEDNPDLIGSEIARWLSTLEISG

SEQ ID NO: 2884 - protein, 277 aa, Synthetic construct
MFHYVDVGPRDGTPVLFLHGNPTSSYVWRNIIPHVAPTHRCIAPDLIGMGKSDKPDLGYFFDDHVRFMDAFIEALGLEEVVLVVHDWGSALGFHWAKRNPERVKGIAFMEFIRPIPTWDEWPEFARETFQAFRTTDVGRKLIIDQNVFIEGTLPMGVVRPLTEVEMDHYREPFLNPVDREPLWRFPNELPIAGEPANIVALVEEYMDWLHTSPVPKLLFWGTPGVLIPPAEAARLAKSLPNCKAVDIGPGLNLLQEDNPDLIGSEIARWLSTLEISG

SEQ ID NO: 2885 - protein, 277 aa, Synthetic construct
MFHYVDVGPRDGTPVLFLHGNPTSSYVWRNIIPHVAPTHRCIAPDLIGMGKSDKPDLGYFFDDHVRFMDAFIEALGLEEVVLVVHDWGSALGFHWAKRNPERVKGIAFMEFIRPIPTWDEWPEFARETFQAFRTTDVGRKLIIDQNVFIEGTLPMGVVRPLTEVEMDHYREPFLNPVDREPLWRFPNELPIAGEPANIVALVEEYMDWLHQSPVPKLLFWGTPGVLIPPAEAARLAESLPNCKAVDIGPGLNLLQEDNPDLIGSEIARWLSTLEISG

SEQ ID NO: 2886 - protein, 277 aa, Synthetic construct
MFHYVDVGPRDGTPVLFLHGNPTSSYVWRNIIPHVAPTHRCIAPDLIGMGKSDKPDLGYFFDDHVRFMDAFIEALGLEEVVLVVHDWGSALGFHWAKRNPERVKGIAFMEFIRPIPTWDEWPEFARETFQAFRTTDVGRKLIIDQNVFIEGTLPMGVVRPLTEVEMDHYREPFLNPVDREPLWRFPNELPIAGEPANIVALVEEYMDWLHQSPVPKLLFWGTPGVLIPPAEAARLAKTLPNCKAVDIGPGLNLLQEDNPDLIGSEIARWLSTLEISG

SEQ ID NO: 2887 - protein, 277 aa, Synthetic construct
MFHYVDVGPRDGTPVLFLHGNPTSSYVWRNIIPHVAPTHRCIAPDLIGMGKSDKPDLGYFFDDHVRFMDAFIEALGLEEVVLVVHDWGSALGFHWAKRNPERVKGIAFMEFIRPIPTWDEWPEFARETFQAFRTTDVGRKLIIDQNVFIEGTLPMGVVRPLTEVEMDHYREPFLNPVDREPLWRFPNELPIAGEPANIVALVEEYMDWLHQSPVPKLLFWGTPGVLIPPAEAARLAKSLPNCKAVDVGPGLNLLQEDNPDLIGSEIARWLSTLEISG

SEQ ID NO: 2888 - protein, 277 aa, Synthetic construct
MFHYVDVGPRDGTPVLFLHGNPTSSYVWRNIIPHVAPTHRCIAPDLIGMGKSDKPDLGYFFDDHVRFMDAFIEALGLEEVVLVVHDWGSALGFHWAKRNPERVKGIAFMEFIRPIPTWDEWPEFARETFQAFRTTDVGRKLIIDQNVFIEGTLPMGVVRPLTEVEMDHYREPFLNPVDREPLWRFPNELPIAGEPANIVALVEEYMDWLHQSPVPKLLFWGTPGVLIPPAEAARLAKSLPNCKAVDIGPGLNLLQEDNPDLIGAEIARWLSTLEISG

SEQ ID NO: 2889 - protein, 277 aa, Synthetic construct
MFHYVDVGPRDGTPVLFLHGNPTSSYVWRNIIPHVAPTHRCIAPDLIGMGKSDKPDLGYFFDDHVRFMDAFIEALGLEEVVLVIHDWGSALGFHWAKRNPERVKGIAFMEFIRPIPTWDDWPEFARETFQAFRTTDVGRKLIIDQNVFIEGTLPMGVVRPLTEVEMDHYREPFLNPADREPLWRFPNELPIAGEPANIVALVEEYMDWLHQSPVPKLLFWGTPGVLIPPAEAARLAKSLPNCKAVDIGPGLNLLQEDNPDLIGSEIARWLSTLEISG

SEQ ID NO: 2890 - protein, 277 aa, Synthetic construct
MFHYVDVGPRDGTPVLFLHGNPTSSYVWRNIIPHVAPTHRCIAPDLIGMGKSDKPDLGYFFDDHVRFMDAFIEALGLEEVVLVIHDWGSALGFHWAKRNPERVKGIAFMEFIRPIPTWDDWPEFARETFQAFRTTDVGRKLIIDQNVFIEGTLPMGVVRPLTEVEMDHYREPFLNPVDREPLWRFPNELPIAGEPANVVALVEEYMDWLHQSPVPKLLFWGTPGVLIPPAEAARLAKSLPNCKAVDIGPGLNLLQEDNPDLIGSEIARWLSTLEISG

SEQ ID NO: 2891 - protein, 277 aa, Synthetic construct
MFHYVDVGPRDGTPVLFLHGNPTSSYVWRNIIPHVAPTHRCIAPDLIGMGKSDKPDLGYFFDDHVRFMDAFIEALGLEEVVLVIHDWGSALGFHWAKRNPERVKGIAFMEFIRPIPTWDDWPEFARETFQAFRTTDVGRKLIIDQNVFIEGTLPMGVVRPLTEVEMDHYREPFLNPVDREPLWRFPNELPIAGEPANIVAIVEEYMDWLHQSPVPKLLFWGTPGVLIPPAEAARLAKSLPNCKAVDIGPGLNLLQEDNPDLIGSEIARWLSTLEISG

SEQ ID NO: 2892 - protein, 277 aa, Synthetic construct
MFHYVDVGPRDGTPVLFLHGNPTSSYVWRNIIPHVAPTHRCIAPDLIGMGKSDKPDLGYFFDDHVRFMDAFIEALGLEEVVLVIHDWGSALGFHWAKRNPERVKGIAFMEFIRPIPTWDDWPEFARETFQAFRTTDVGRKLIIDQNVFIEGTLPMGVVRPLTEVEMDHYREPFLNPVDREPLWRFPNELPIAGEPANIVALVDEYMDWLHQSPVPKLLFWGTPGVLIPPAEAARLAKSLPNCKAVDIGPGLNLLQEDNPDLIGSEIARWLSTLEISG

SEQ ID NO: 2893 - protein, 277 aa, Synthetic construct
MFHYVDVGPRDGTPVLFLHGNPTSSYVWRNIIPHVAPTHRCIAPDLIGMGKSDKPDLGYFFDDHVRFMDAFIEALGLEEVVLVIHDWGSALGFHWAKRNPERVKGIAFMEFIRPIPTWDDWPEFARETFQAFRTTDVGRKLIIDQNVFIEGTLPMGVVRPLTEVEMDHYREPFLNPVDREPLWRFPNELPIAGEPANIVALVEEYMDWLHTSPVPKLLFWGTPGVLIPPAEAARLAKSLPNCKAVDIGPGLNLLQEDNPDLIGSEIARWLSTLEISG

SEQ ID NO: 2894 - protein, 277 aa, Synthetic construct
MFHYVDVGPRDGTPVLFLHGNPTSSYVWRNIIPHVAPTHRCIAPDLIGMGKSDKPDLGYFFDDHVRFMDAFIEALGLEEVVLVIHDWGSALGFHWAKRNPERVKGIAFMEFIRPIPTWDDWPEFARETFQAFRTTDVGRKLIIDQNVFIEGTLPMGVVRPLTEVEMDHYREPFLNPVDREPLWRFPNELPIAGEPANIVALVEEYMDWLHQSPVPKLLFWGTPGVLIPPAEAARLAESLPNCKAVDIGPGLNLLQEDNPDLIGSEIARWLSTLEISG

SEQ ID NO: 2895 - protein, 277 aa, Synthetic construct
MFHYVDVGPRDGTPVLFLHGNPTSSYVWRNIIPHVAPTHRCIAPDLIGMGKSDKPDLGYFFDDHVRFMDAFIEALGLEEVVLVIHDWGSALGFHWAKRNPERVKGIAFMEFIRPIPTWDDWPEFARETFQAFRTTDVGRKLIIDQNVFIEGTLPMGVVRPLTEVEMDHYREPFLNPVDREPLWRFPNELPIAGEPANIVALVEEYMDWLHQSPVPKLLFWGTPGVLIPPAEAARLAKTLPNCKAVDIGPGLNLLQEDNPDLIGSEIARWLSTLEISG

SEQ ID NO: 2896 - protein, 277 aa, Synthetic construct
MFHYVDVGPRDGTPVLFLHGNPTSSYVWRNIIPHVAPTHRCIAPDLIGMGKSDKPDLGYFFDDHVRFMDAFIEALGLEEVVLVIHDWGSALGFHWAKRNPERVKGIAFMEFIRPIPTWDDWPEFARETFQAFRTTDVGRKLIIDQNVFIEGTLPMGVVRPLTEVEMDHYREPFLNPVDREPLWRFPNELPIAGEPANIVALVEEYMDWLHQSPVPKLLFWGTPGVLIPPAEAARLAKSLPNCKAVDVGPGLNLLQEDNPDLIGSEIARWLSTLEISG

SEQ ID NO: 2897 - protein, 277 aa, Synthetic construct
MFHYVDVGPRDGTPVLFLHGNPTSSYVWRNIIPHVAPTHRCIAPDLIGMGKSDKPDLGYFFDDHVRFMDAFIEALGLEEVVLVIHDWGSALGFHWAKRNPERVKGIAFMEFIRPIPTWDDWPEFARETFQAFRTTDVGRKLIIDQNVFIEGTLPMGVVRPLTEVEMDHYREPFLNPVDREPLWRFPNELPIAGEPANIVALVEEYMDWLHQSPVPKLLFWGTPGVLIPPAEAARLAKSLPNCKAVDIGPGLNLLQEDNPDLIGAEIARWLSTLEISG

SEQ ID NO: 2898 - protein, 277 aa, Synthetic construct
MFHYVDVGPRDGTPVLFLHGNPTSSYVWRNIIPHVAPTHRCIAPDLIGMGKSDKPDLGYFFDDHVRFMDAFIEALGLEEVVLVIHDWGSALGFHWAKRNPERVKGIAFMEFIRPIPTWDEFPEFARETFQAFRTTDVGRKLIIDQNVFIEGTLPMGVVRPLTEVEMDHYREPFLNPADREPLWRFPNELPIAGEPANIVALVEEYMDWLHQSPVPKLLFWGTPGVLIPPAEAARLAKSLPNCKAVDIGPGLNLLQEDNPDLIGSEIARWLSTLEISG

SEQ ID NO: 2899 - protein, 277 aa, Synthetic construct
MFHYVDVGPRDGTPVLFLHGNPTSSYVWRNIIPHVAPTHRCIAPDLIGMGKSDKPDLGYFFDDHVRFMDAFIEALGLEEVVLVIHDWGSALGFHWAKRNPERVKGIAFMEFIRPIPTWDEFPEFARETFQAFRTTDVGRKLIIDQNVFIEGTLPMGVVRPLTEVEMDHYREPFLNPVDREPLWRFPNELPIAGEPANVVALVEEYMDWLHQSPVPKLLFWGTPGVLIPPAEAARLAKSLPNCKAVDIGPGLNLLQEDNPDLIGSEIARWLSTLEISG

SEQ ID NO: 2900 - protein, 277 aa, Synthetic construct
MFHYVDVGPRDGTPVLFLHGNPTSSYVWRNIIPHVAPTHRCIAPDLIGMGKSDKPDLGYFFDDHVRFMDAFIEALGLEEVVLVIHDWGSALGFHWAKRNPERVKGIAFMEFIRPIPTWDEFPEFARETFQAFRTTDVGRKLIIDQNVFIEGTLPMGVVRPLTEVEMDHYREPFLNPVDREPLWRFPNELPIAGEPANIVAIVEEYMDWLHQSPVPKLLFWGTPGVLIPPAEAARLAKSLPNCKAVDIGPGLNLLQEDNPDLIGSEIARWLSTLEISG

SEQ ID NO: 2901 - protein, 277 aa, Synthetic construct
MFHYVDVGPRDGTPVLFLHGNPTSSYVWRNIIPHVAPTHRCIAPDLIGMGKSDKPDLGYFFDDHVRFMDAFIEALGLEEVVLVIHDWGSALGFHWAKRNPERVKGIAFMEFIRPIPTWDEFPEFARETFQAFRTTDVGRKLIIDQNVFIEGTLPMGVVRPLTEVEMDHYREPFLNPVDREPLWRFPNELPIAGEPANIVALVDEYMDWLHQSPVPKLLFWGTPGVLIPPAEAARLAKSLPNCKAVDIGPGLNLLQEDNPDLIGSEIARWLSTLEISG

SEQ ID NO: 2902 - protein, 277 aa, Synthetic construct
MFHYVDVGPRDGTPVLFLHGNPTSSYVWRNIIPHVAPTHRCIAPDLIGMGKSDKPDLGYFFDDHVRFMDAFIEALGLEEVVLVIHDWGSALGFHWAKRNPERVKGIAFMEFIRPIPTWDEFPEFARETFQAFRTTDVGRKLIIDQNVFIEGTLPMGVVRPLTEVEMDHYREPFLNPVDREPLWRFPNELPIAGEPANIVALVEEYMDWLHTSPVPKLLFWGTPGVLIPPAEAARLAKSLPNCKAVDIGPGLNLLQEDNPDLIGSEIARWLSTLEISG

SEQ ID NO: 2903 - protein, 277 aa, Synthetic construct
MFHYVDVGPRDGTPVLFLHGNPTSSYVWRNIIPHVAPTHRCIAPDLIGMGKSDKPDLGYFFDDHVRFMDAFIEALGLEEVVLVIHDWGSALGFHWAKRNPERVKGIAFMEFIRPIPTWDEFPEFARETFQAFRTTDVGRKLIIDQNVFIEGTLPMGVVRPLTEVEMDHYREPFLNPVDREPLWRFPNELPIAGEPANIVALVEEYMDWLHQSPVPKLLFWGTPGVLIPPAEAARLAESLPNCKAVDIGPGLNLLQEDNPDLIGSEIARWLSTLEISG

SEQ ID NO: 2904 - protein, 277 aa, Synthetic construct
MFHYVDVGPRDGTPVLFLHGNPTSSYVWRNIIPHVAPTHRCIAPDLIGMGKSDKPDLGYFFDDHVRFMDAFIEALGLEEVVLVIHDWGSALGFHWAKRNPERVKGIAFMEFIRPIPTWDEFPEFARETFQAFRTTDVGRKLIIDQNVFIEGTLPMGVVRPLTEVEMDHYREPFLNPVDREPLWRFPNELPIAGEPANIVALVEEYMDWLHQSPVPKLLFWGTPGVLIPPAEAARLAKTLPNCKAVDIGPGLNLLQEDNPDLIGSEIARWLSTLEISG

SEQ ID NO: 2905 - protein, 277 aa, Synthetic construct
MFHYVDVGPRDGTPVLFLHGNPTSSYVWRNIIPHVAPTHRCIAPDLIGMGKSDKPDLGYFFDDHVRFMDAFIEALGLEEVVLVIHDWGSALGFHWAKRNPERVKGIAFMEFIRPIPTWDEFPEFARETFQAFRTTDVGRKLIIDQNVFIEGTLPMGVVRPLTEVEMDHYREPFLNPVDREPLWRFPNELPIAGEPANIVALVEEYMDWLHQSPVPKLLFWGTPGVLIPPAEAARLAKSLPNCKAVDVGPGLNLLQEDNPDLIGSEIARWLSTLEISG

SEQ ID NO: 2906 - protein, 277 aa, Synthetic construct
MFHYVDVGPRDGTPVLFLHGNPTSSYVWRNIIPHVAPTHRCIAPDLIGMGKSDKPDLGYFFDDHVRFMDAFIEALGLEEVVLVIHDWGSALGFHWAKRNPERVKGIAFMEFIRPIPTWDEFPEFARETFQAFRTTDVGRKLIIDQNVFIEGTLPMGVVRPLTEVEMDHYREPFLNPVDREPLWRFPNELPIAGEPANIVALVEEYMDWLHQSPVPKLLFWGTPGVLIPPAEAARLAKSLPNCKAVDIGPGLNLLQEDNPDLIGAEIARWLSTLEISG

SEQ ID NO: 2907 - protein, 277 aa, Synthetic construct
MFHYVDVGPRDGTPVLFLHGNPTSSYVWRNIIPHVAPTHRCIAPDLIGMGKSDKPDLGYFFDDHVRFMDAFIEALGLEEVVLVIHDWGSALGFHWAKRNPERVKGIAFMEFIRPIPTWDEWPEFARETFQAFRTTDVGRELIIDQNVFIEGTLPMGVVRPLTEVEMDHYREPFLNPADREPLWRFPNELPIAGEPANIVALVEEYMDWLHQSPVPKLLFWGTPGVLIPPAEAARLAKSLPNCKAVDIGPGLNLLQEDNPDLIGSEIARWLSTLEISG

SEQ ID NO: 2908 - protein, 277 aa, Synthetic construct
MFHYVDVGPRDGTPVLFLHGNPTSSYVWRNIIPHVAPTHRCIAPDLIGMGKSDKPDLGYFFDDHVRFMDAFIEALGLEEVVLVIHDWGSALGFHWAKRNPERVKGIAFMEFIRPIPTWDEWPEFARETFQAFRTTDVGRELIIDQNVFIEGTLPMGVVRPLTEVEMDHYREPFLNPVDREPLWRFPNELPIAGEPANVVALVEEYMDWLHQSPVPKLLFWGTPGVLIPPAEAARLAKSLPNCKAVDIGPGLNLLQEDNPDLIGSEIARWLSTLEISG

SEQ ID NO: 2909 - protein, 277 aa, Synthetic construct
MFHYVDVGPRDGTPVLFLHGNPTSSYVWRNIIPHVAPTHRCIAPDLIGMGKSDKPDLGYFFDDHVRFMDAFIEALGLEEVVLVIHDWGSALGFHWAKRNPERVKGIAFMEFIRPIPTWDEWPEFARETFQAFRTTDVGRELIIDQNVFIEGTLPMGVVRPLTEVEMDHYREPFLNPVDREPLWRFPNELPIAGEPANIVAIVEEYMDWLHQSPVPKLLFWGTPGVLIPPAEAARLAKSLPNCKAVDIGPGLNLLQEDNPDLIGSEIARWLSTLEISG

SEQ ID NO: 2910 - protein, 277 aa, Synthetic construct
MFHYVDVGPRDGTPVLFLHGNPTSSYVWRNIIPHVAPTHRCIAPDLIGMGKSDKPDLGYFFDDHVRFMDAFIEALGLEEVVLVIHDWGSALGFHWAKRNPERVKGIAFMEFIRPIPTWDEWPEFARETFQAFRTTDVGRELIIDQNVFIEGTLPMGVVRPLTEVEMDHYREPFLNPVDREPLWRFPNELPIAGEPANIVALVDEYMDWLHQSPVPKLLFWGTPGVLIPPAEAARLAKSLPNCKAVDIGPGLNLLQEDNPDLIGSEIARWLSTLEISG

SEQ ID NO: 2911 - protein, 277 aa, Synthetic construct
MFHYVDVGPRDGTPVLFLHGNPTSSYVWRNIIPHVAPTHRCIAPDLIGMGKSDKPDLGYFFDDHVRFMDAFIEALGLEEVVLVIHDWGSALGFHWAKRNPERVKGIAFMEFIRPIPTWDEWPEFARETFQAFRTTDVGRELIIDQNVFIEGTLPMGVVRPLTEVEMDHYREPFLNPVDREPLWRFPNELPIAGEPANIVALVEEYMDWLHTSPVPKLLFWGTPGVLIPPAEAARLAKSLPNCKAVDIGPGLNLLQEDNPDLIGSEIARWLSTLEISG

SEQ ID NO: 2912 - protein, 277 aa, Synthetic construct
MFHYVDVGPRDGTPVLFLHGNPTSSYVWRNIIPHVAPTHRCIAPDLIGMGKSDKPDLGYFFDDHVRFMDAFIEALGLEEVVLVIHDWGSALGFHWAKRNPERVKGIAFMEFIRPIPTWDEWPEFARETFQAFRTTDVGRELIIDQNVFIEGTLPMGVVRPLTEVEMDHYREPFLNPVDREPLWRFPNELPIAGEPANIVALVEEYMDWLHQSPVPKLLFWGTPGVLIPPAEAARLAESLPNCKAVDIGPGLNLLQEDNPDLIGSEIARWLSTLEISG

SEQ ID NO: 2913 - protein, 277 aa, Synthetic construct
MFHYVDVGPRDGTPVLFLHGNPTSSYVWRNIIPHVAPTHRCIAPDLIGMGKSDKPDLGYFFDDHVRFMDAFIEALGLEEVVLVIHDWGSALGFHWAKRNPERVKGIAFMEFIRPIPTWDEWPEFARETFQAFRTTDVGRELIIDQNVFIEGTLPMGVVRPLTEVEMDHYREPFLNPVDREPLWRFPNELPIAGEPANIVALVEEYMDWLHQSPVPKLLFWGTPGVLIPPAEAARLAKTLPNCKAVDIGPGLNLLQEDNPDLIGSEIARWLSTLEISG

SEQ ID NO: 2914 - protein, 277 aa, Synthetic construct
MFHYVDVGPRDGTPVLFLHGNPTSSYVWRNIIPHVAPTHRCIAPDLIGMGKSDKPDLGYFFDDHVRFMDAFIEALGLEEVVLVIHDWGSALGFHWAKRNPERVKGIAFMEFIRPIPTWDEWPEFARETFQAFRTTDVGRELIIDQNVFIEGTLPMGVVRPLTEVEMDHYREPFLNPVDREPLWRFPNELPIAGEPANIVALVEEYMDWLHQSPVPKLLFWGTPGVLIPPAEAARLAKSLPNCKAVDVGPGLNLLQEDNPDLIGSEIARWLSTLEISG

SEQ ID NO: 2915 - protein, 277 aa, Synthetic construct
MFHYVDVGPRDGTPVLFLHGNPTSSYVWRNIIPHVAPTHRCIAPDLIGMGKSDKPDLGYFFDDHVRFMDAFIEALGLEEVVLVIHDWGSALGFHWAKRNPERVKGIAFMEFIRPIPTWDEWPEFARETFQAFRTTDVGRELIIDQNVFIEGTLPMGVVRPLTEVEMDHYREPFLNPVDREPLWRFPNELPIAGEPANIVALVEEYMDWLHQSPVPKLLFWGTPGVLIPPAEAARLAKSLPNCKAVDIGPGLNLLQEDNPDLIGAEIARWLSTLEISG

SEQ ID NO: 2916 - protein, 277 aa, Synthetic construct
MFHYVDEGPRDGTPVLFLHGNPTSSYVWRNIIPHVAPTHRCIAPDLIGMGKSDKPDLGYFFDDHVRFMDAFIEALGLEEVVLVIHDWGSALGFHWAKRNPERVKGIAFMEFIRPIPTWDEWPEFARETFQAFRTTDVGRKLIIDQNVFIEGTLPMGVVRPLTEVEMDHYREPFLNPVDREPLWRFPNELPIAGEPANIVALVEEYMDWLHQSPVPKLLFWGTPGVLIPPAEAARLAKTLPNCKAVDIGPGLNLLQEDNPDLIGAEIARWLSTLEISG

SEQ ID NO: 2917 - protein, 277 aa, Synthetic construct
MFHYVDEGPRDGTPVLFLHGNPTSSYVWRNIIPHVAPTHRCIAPDLIGMGKSGKPDLGYFFDDHVRFMDAFIEALGLEEVVLVIHDWGSALGFHWAKRNPERVKGIAFMEFIRPIPTWDEWPEFARETFQAFRTTDVGRKLIIDQNVFIEGTLPMGVVRPLTEVEMDHYREPFLNPVDREPLWRFPNELPIAGEPANIVALVEEYMDWLHQSPVPKLLFWGTPGVLIPPAEAARLAKTLPNCKAVDIGPGLNLLQEDNPDLIGSEIARWLSTLEISG

SEQ ID NO: 2918 - protein, 277 aa, Synthetic construct
MFHYVDEGPRDGTPVLFLHGNPTSSYVWRNIIPHVAPTHRCIAPDLIGMGKSDKPDLGYFFDDHVRFMDAFIEALGLEEVVLVIHDWGSALGFHWAKRNPERVKGIAFMEFIRPIPTWDEWPEFARETFQAFRTTDVGRKLIIDQNVFIEGTLPMGVVRPLTEVEMDHYREPFLNPADREPLWRFPNELPIAGEPANIVALVEEYMDWLHQSPVPKLLFWGTPGVLIPPAEAARLAKTLPNCKAVDIGPGLNLLQEDNPDLIGSEIARWLSTLEISG

SEQ ID NO: 2919 - protein, 277 aa, Synthetic construct
MFHYVDEGPRDGTPVLFLHGNPTSSYVWRNIIPHVAPTHRCIAPDLIGMGKSDKPDLGYFFDDHVRFMDAFIEALGLEEVVLVIHDWGSALGFHWAKRNPERVKGIAFMEFIRPIPTWDEFPEFARETFQAFRTTDVGRKLIIDQNVFIEGTLPMGVVRPLTEVEMDHYREPFLNPVDREPLWRFPNELPIAGEPANIVALVEEYMDWLHQSPVPKLLFWGTPGVLIPPAEAARLAKTLPNCKAVDIGPGLNLLQEDNPDLIGSEIARWLSTLEISG

SEQ ID NO: 2920 - protein, 277 aa, Synthetic construct
MFHYVDEGPRDGTPVLFLHGNPTSSYVWRNIIPHVAPTHRCIAPDLIGMGKSDKPDLGYFFDDHVRFMDAFIEALGLEEVVLVIHDWGSALGFHWAKRNPERVKGIAFMEFIRPIPTWDEWPEFARETFQAFRTTDVGRKLIIDQNVFIEGTLPMGVVRPLTEVEMDHYREPFLNPVDREPLWRFPNELPIAGEPANVVALVEEYMDWLHQSPVPKLLFWGTPGVLIPPAEAARLAKTLPNCKAVDIGPGLNLLQEDNPDLIGSEIARWLSTLEISG

SEQ ID NO: 2921 - protein, 277 aa, Synthetic construct
MFHYVDEGPRDGTPVLFLHGNPTSSYVWRNIIPHVAPTHRCIAPDLIGMGKSGKPDLGYFFDDHVRFMDAFIEALGLEEVVLVIHDWGSALGFHWAKRNPERVKGIAFMEFIRPIPTWDEWPEFARETFQAFRTTDVGRKLIIDQNVFIEGTLPMGVVRPLTEVEMDHYREPFLNPADREPLWRFPNELPIAGEPANIVALVEEYMDWLHQSPVPKLLFWGTPGVLIPPAEAARLAKTLPNCKAVDIGPGLNLLQEDNPDLIGSEIARWLSTLEISG

SEQ ID NO: 2922 - protein, 277 aa, Synthetic construct
MFHYVDEGPRDGTPVLFLHGNPTSSYVWRNIIPHVAPTHRCIAPDLIGMGKSDKPDLGYFFDDHVRFMDAFIEALGLEEVVLVIHDWGSALGFHWAKRNPERVKGIAFMEFIRPIPTWDEFPEFARETFQAFRTTDVGRKLIIDQNVFIEGTLPMGVVRPLTEVEMDHYREPFLNPVDREPLWRFPNELPIAGEPANVVALVEEYMDWLHQSPVPKLLFWGTPGVLIPPAEAARLAKTLPNCKAVDIGPGLNLLQEDNPDLIGSEIARWLSTLEISG

SEQ ID NO: 2923 - protein, 277 aa, Synthetic construct
MFHYVDEGPRDGTPVLFLHGNPTSSYVWRNIIPHVAPTHRCIAPDLIGMGKSGKPDLGYFFDDHVRFMDAFIEALGLEEVVLVIHDWGSALGFHWAKRNPERVKGIAFMEFIRPIPTWDEWPEFARETFQAFRTTDVGRKLIIDQNVFIEGTLPMGVVRPLTEVEMDHYREPFLNPVDREPLWRFPNELPIAGEPANIVALVEEYMDWLHQSPVPKLLFWGTPGVLIPPAEAARLAKSLPNCKAVDIGPGLNLLQEDNPDLIGAEIARWLSTLEISG

SEQ ID NO: 2924 - protein, 277 aa, Synthetic construct
MFHYVDEGPRDGTPVLFLHGNPTSSYVWRNIIPHVAPTHRCIAPDLIGMGKSDKPDLGYFFDDHVRFMDAFIEALGLEEVVLVIHDWGSALGFHWAKRNPERVKGIAFMEFIRPIPTWDEWPEFARETFQAFRTTDVGRKLIIDQNVFIEGTLPMGVVRPLTEVEMDHYREPFLNPADREPLWRFPNELPIAGEPANIVALVEEYMDWLHQSPVPKLLFWGTPGVLIPPAEAARLAKSLPNCKAVDIGPGLNLLQEDNPDLIGAEIARWLSTLEISG

SEQ ID NO: 2925 - protein, 277 aa, Synthetic construct
MFHYVDEGPRDGTPVLFLHGNPTSSYVWRNIIPHVAPTHRCIAPDLIGMGKSDKPDLGYFFDDHVRFMDAFIEALGLEEVVLVIHDWGSALGFHWAKRNPERVKGIAFMEFIRPIPTWDEFPEFARETFQAFRTTDVGRKLIIDQNVFIEGTLPMGVVRPLTEVEMDHYREPFLNPVDREPLWRFPNELPIAGEPANIVALVEEYMDWLHQSPVPKLLFWGTPGVLIPPAEAARLAKSLPNCKAVDIGPGLNLLQEDNPDLIGAEIARWLSTLEISG

SEQ ID NO: 2926 - protein, 277 aa, Synthetic construct
MFHYVDEGPRDGTPVLFLHGNPTSSYVWRNIIPHVAPTHRCIAPDLIGMGKSDKPDLGYFFDDHVRFMDAFIEALGLEEVVLVIHDWGSALGFHWAKRNPERVKGIAFMEFIRPIPTWDEWPEFARETFQAFRTTDVGRKLIIDQNVFIEGTLPMGVVRPLTEVEMDHYREPFLNPVDREPLWRFPNELPIAGEPANVVALVEEYMDWLHQSPVPKLLFWGTPGVLIPPAEAARLAKSLPNCKAVDIGPGLNLLQEDNPDLIGAEIARWLSTLEISG

SEQ ID NO: 2927 - protein, 277 aa, Synthetic construct
MFHYVDEGPRDGTPVLFLHGNPTSSYVWRNIIPHVAPTHRCIAPDLIGMGKSGKPDLGYFFDDHVRFMDAFIEALGLEEVVLVIHDWGSALGFHWAKRNPERVKGIAFMEFIRPIPTWDEWPEFARETFQAFRTTDVGRKLIIDQNVFIEGTLPMGVVRPLTEVEMDHYREPFLNPADREPLWRFPNELPIAGEPANIVALVEEYMDWLHQSPVPKLLFWGTPGVLIPPAEAARLAKSLPNCKAVDIGPGLNLLQEDNPDLIGAEIARWLSTLEISG

SEQ ID NO: 2928 - protein, 277 aa, Synthetic construct
MFHYVDEGPRDGTPVLFLHGNPTSSYVWRNIIPHVAPTHRCIAPDLIGMGKSDKPDLGYFFDDHVRFMDAFIEALGLEEVVLVIHDWGSALGFHWAKRNPERVKGIAFMEFIRPIPTWDEFPEFARETFQAFRTTDVGRKLIIDQNVFIEGTLPMGVVRPLTEVEMDHYREPFLNPVDREPLWRFPNELPIAGEPANVVALVEEYMDWLHQSPVPKLLFWGTPGVLIPPAEAARLAKSLPNCKAVDIGPGLNLLQEDNPDLIGAEIARWLSTLEISG

SEQ ID NO: 2929 - protein, 277 aa, Synthetic construct
MFHYVDEGPRDGTPVLFLHGNPTSSYVWRNIIPHVAPTHRCIAPDLIGMGKSGKPDLGYFFDDHVRFMDAFIEALGLEEVVLVIHDWGSALGFHWAKRNPERVKGIAFMEFIRPIPTWDEWPEFARETFQAFRTTDVGRKLIIDQNVFIEGTLPMGVVRPLTEVEMDHYREPFLNPADREPLWRFPNELPIAGEPANIVALVEEYMDWLHQSPVPKLLFWGTPGVLIPPAEAARLAKSLPNCKAVDIGPGLNLLQEDNPDLIGSEIARWLSTLEISG

SEQ ID NO: 2930 - protein, 277 aa, Synthetic construct
MFHYVDVGPRDGTPVLFLHGNPTSSYVWRNIIPHVAPTHRCIAPDLIGMGKSGKPDLGYFFDDHVRFMDAFIEALGLEEVVLVIHDWGSALGFHWAKRNPERVKGIAFMEFIRPIPTWDEWPEFARETFQAFRTTDVGRKLIIDQNVFIEGTLPMGVVRPLTEVEMDHYREPFLNPADREPLWRFPNELPIAGEPANIVALVEEYMDWLHQSPVPKLLFWGTPGVLIPPAEAARLAKTLPNCKAVDIGPGLNLLQEDNPDLIGSEIARWLSTLEISG

SEQ ID NO: 2931 - protein, 277 aa, Synthetic construct
MFHYVDVGPRDGTPVLFLHGNPTSSYVWRNIIPHVAPTHRCIAPDLIGMGKSGKPDLGYFFDDHVRFMDAFIEALGLEEVVLVIHDWGSALGFHWAKRNPERVKGIAFMEFIRPIPTWDEWPEFARETFQAFRTTDVGRKLIIDQNVFIEGTLPMGVVRPLTEVEMDHYREPFLNPADREPLWRFPNELPIAGEPANIVALVEEYMDWLHQSPVPKLLFWGTPGVLIPPAEAARLAKSLPNCKAVDIGPGLNLLQEDNPDLIGAEIARWLSTLEISG

SEQ ID NO: 2932 - protein, 277 aa, Synthetic construct
MFHYVDVGPRDGTPVLFLHGNPTSSYVWRNIIPHVAPTHRCIAPDLIGMGKSGKPDLGYFFDDHVRFMDAFIEALGLEEVVLVIHDWGSALGFHWAKRNPERVKGIAFMEFIRPIPTWDEFPEFARETFQAFRTTDVGRKLIIDQNVFIEGTLPMGVVRPLTEVEMDHYREPFLNPADREPLWRFPNELPIAGEPANIVALVEEYMDWLHQSPVPKLLFWGTPGVLIPPAEAARLAKSLPNCKAVDIGPGLNLLQEDNPDLIGSEIARWLSTLEISG

SEQ ID NO: 2933 - protein, 277 aa, Synthetic construct
MFHYVDVGPRDGTPVLFLHGNPTSSYVWRNIIPHVAPTHRCIAPDLIGMGKSGKPDLGYFFDDHVRFMDAFIEALGLEEVVLVIHDWGSALGFHWAKRNPERVKGIAFMEFIRPIPTWDEWPEFARETFQAFRTTDVGRKLIIDQNVFIEGTLPMGVVRPLTEVEMDHYREPFLNPADREPLWRFPNELPIAGEPANVVALVEEYMDWLHQSPVPKLLFWGTPGVLIPPAEAARLAKSLPNCKAVDIGPGLNLLQEDNPDLIGSEIARWLSTLEISG

SEQ ID NO: 2934 - protein, 277 aa, Synthetic construct
MFHYVDVGPRDGTPVLFLHGNPTSSYVWRNIIPHVAPTHRCIAPDLIGMGKSGKPDLGYFFDDHVRFMDAFIEALGLEEVVLVIHDWGSALGFHWAKRNPERVKGIAFMEFIRPIPTWDEFPEFARETFQAFRTTDVGRKLIIDQNVFIEGTLPMGVVRPLTEVEMDHYREPFLNPADREPLWRFPNELPIAGEPANVVALVEEYMDWLHQSPVPKLLFWGTPGVLIPPAEAARLAKSLPNCKAVDIGPGLNLLQEDNPDLIGSEIARWLSTLEISG

SEQ ID NO: 2935 - protein, 277 aa, Synthetic construct
MFHYVDVGPRDGTPVLFLHGNPTSSYVWRNIIPHVAPTHRCIAPDLIGMGKSGKPDLGYFFDDHVRFMDAFIEALGLEEVVLVIHDWGSALGFHWAKRNPERVKGIAFMEFIRPIPTWDEWPEFARETFQAFRTTDVGRKLIIDQNVFIEGTLPMGVVRPLTEVEMDHYREPFLNPADREPLWRFPNELPIAGEPANIVALVEEYMDWLHQSPVPKLLFWGTPGVLIPPAEAARLAKTLPNCKAVDIGPGLNLLQEDNPDLIGAEIARWLSTLEISG

SEQ ID NO: 2936 - protein, 277 aa, Synthetic construct
MFHYVDEGPRDGTPVLFLHGNPTSSYVWRNIIPHVAPTHRCIAPDLIGMGKSDKPDLGYFFDDHVRFMDAFIEALGLEEVVLVIHDWGSALGFHWAKRNPERVKGIAFMEFIRPIPTWDEFPEFARETFQAFRTTDVGRKLIIDQNVFIEGTLPMGVVRPLTEVEMDHYREPFLNPVDREPLWRFPNELPIAGEPANVVALVEEYMDWLHQSPVPKLLFWGTPGVLIPPAEAARLAKSLPNCKAVDIGPGLNLLQEDNPDLIGSEIARWLSTLEISG

SEQ ID NO: 2937 - protein, 277 aa, Synthetic construct
MFHYVDVGPRDGTPVLFLHGNPTSSYVWRNIIPHVAPTHRCIAPDLIGMGKSDKPDLGYFFDDHVRFMDAFIEALGLEEVVLVIHDWGSALGFHWAKRNPERVKGIAFMEFIRPIPTWDEFPEFARETFQAFRTTDVGRKLIIDQNVFIEGTLPMGVVRPLTEVEMDHYREPFLNPVDREPLWRFPNELPIAGEPANVVALVEEYMDWLHQSPVPKLLFWGTPGVLIPPAEAARLAKSLPNCKAVDIGPGLNLLQEDNPDLIGAEIARWLSTLEISG

SEQ ID NO: 2938 - protein, 277 aa, Synthetic construct
MFHYVDVGPRDGTPVLFLHGNPTSSYVWRNIIPHVAPTHRCIAPDLIGMGKSGKPDLGYFFDDHVRFMDAFIEALGLEEVVLVIHDWGSALGFHWAKRNPERVKGIAFMEFIRPIPTWDEFPEFARETFQAFRTTDVGRKLIIDQNVFIEGTLPMGVVRPLTEVEMDHYREPFLNPVDREPLWRFPNELPIAGEPANVVALVEEYMDWLHQSPVPKLLFWGTPGVLIPPAEAARLAKSLPNCKAVDIGPGLNLLQEDNPDLIGSEIARWLSTLEISG

SEQ ID NO: 2939 - protein, 277 aa, Synthetic construct
MFHYVDVGPRDGTPVLFLHGNPTSSYVWRNIIPHVAPTHRCIAPDLIGMGKSDKPDLGYFFDDHVRFMDAFIEALGLEEVVLVIHDWGSALGFHWAKRNPERVKGIAFMEFIRPIPTWDEFPEFARETFQAFRTTDVGRKLIIDQNVFIEGTLPMGVVRPLTEVEMDHYREPFLNPADREPLWRFPNELPIAGEPANVVALVEEYMDWLHQSPVPKLLFWGTPGVLIPPAEAARLAKSLPNCKAVDIGPGLNLLQEDNPDLIGSEIARWLSTLEISG

SEQ ID NO: 2940 - protein, 277 aa, Synthetic construct
MFHYVDVGPRDGTPVLFLHGNPTSSYVWRNIIPHVAPTHRCIAPDLIGMGKSDKPDLGYFFDDHVRFMDAFIEAMELEEVVLVIHDWGSALGFHWAKRNPERVKGIAFMEFIRPIPTWDEWPEFARETFQAFRTTDVGRKLIIDQNVFIEGTLPMGVVRPLTEVEMDHYREPFLNPVDREPLWRFPNELPIAGEPANIVALVEEYMDWLHQSPVPKLLFWGTPGVLIPPAEAARLAKSLPNCKAVDIGPGLNLLQEDNPDLIGSEIARWLSTLEISG

SEQ ID NO: 2941 - protein, 277 aa, Synthetic construct
MFHYVDVGPRDGTPVLFLHGNPTSSYVWRNIIPHVAPTHRCIAPDLIGMGKSDKPDLGYFFDDHVRFMDAFIEAMGLEEVVLVIHDWGAALGFHWAKRNPERVKGIAFMEFIRPIPTWDEWPEFARETFQAFRTTDVGRKLIIDQNVFIEGTLPMGVVRPLTEVEMDHYREPFLNPVDREPLWRFPNELPIAGEPANIVALVEEYMDWLHQSPVPKLLFWGTPGVLIPPAEAARLAKSLPNCKAVDIGPGLNLLQEDNPDLIGSEIARWLSTLEISG

SEQ ID NO: 2942 - protein, 277 aa, Synthetic construct
MFHYVDVGPRDGTPVLFLHGNPTSSYVWRNIIPHVAPTHRCIAPDLIGMGKSDKPDLGYFFDDHVRFMDAFIEAMGLEEVVLVIHDWGSALGFHWAKRYPERVKGIAFMEFIRPIPTWDEWPEFARETFQAFRTTDVGRKLIIDQNVFIEGTLPMGVVRPLTEVEMDHYREPFLNPVDREPLWRFPNELPIAGEPANIVALVEEYMDWLHQSPVPKLLFWGTPGVLIPPAEAARLAKSLPNCKAVDIGPGLNLLQEDNPDLIGSEIARWLSTLEISG

SEQ ID NO: 2943 - protein, 277 aa, Synthetic construct
MFHYVDVGPRDGTPVLFLHGNPTSSYVWRNIIPHVAPTHRCIAPDLIGMGKSDKPDLGYFFDDHVRFMDAFIEAMGLEEVVLVIHDWGSALGFHWAKRNPERVKGIAFFEFIRPIPTWDEWPEFARETFQAFRTTDVGRKLIIDQNVFIEGTLPMGVVRPLTEVEMDHYREPFLNPVDREPLWRFPNELPIAGEPANIVALVEEYMDWLHQSPVPKLLFWGTPGVLIPPAEAARLAKSLPNCKAVDIGPGLNLLQEDNPDLIGSEIARWLSTLEISG

SEQ ID NO: 2944 - protein, 277 aa, Synthetic construct
MFHYVDVGPRDGTPVLFLHGNPTSSYVWRNIIPHVAPTHRCIAPDLIGMGKSDKPDLGYFFDDHVRFMDAFIEAMGLEEVVLVIHDWGSALGFHWAKRNPERVKGIAFMEFIRPIPTWDEWPEFARETFQAFRTEDVGRKLIIDQNVFIEGTLPMGVVRPLTEVEMDHYREPFLNPVDREPLWRFPNELPIAGEPANIVALVEEYMDWLHQSPVPKLLFWGTPGVLIPPAEAARLAKSLPNCKAVDIGPGLNLLQEDNPDLIGSEIARWLSTLEISG

SEQ ID NO: 2945 - protein, 277 aa, Synthetic construct
MFHYVDVGPRDGTPVLFLHGNPTSSYVWRNIIPHVAPTHRCIAPDLIGMGKSDKPDLGYFFDDHVRFMDAFIEAMGLEEVVLVIHDWGSALGFHWAKRNPERVKGIAFMEFIRPIPTWDEWPEFARETFQAFRTTDVGRKLIIDQNVFIEGTLPMGVVRPLTEVEMDHYREPFLNPEDREPLWRFPNELPIAGEPANIVALVEEYMDWLHQSPVPKLLFWGTPGVLIPPAEAARLAKSLPNCKAVDIGPGLNLLQEDNPDLIGSEIARWLSTLEISG

SEQ ID NO: 2946 - protein, 277 aa, Synthetic construct
MFHYVDVGPRDGTPVLFLHGNPTSSYVWRNIIPHVAPTHRCIAPDLIGMGKSDKPDLGYFFDDHVRFMDAFIEAMGLEEVVLVIHDWGSALGFHWAKRNPERVKGIAFMEFIRPIPTWDEWPEFARETFQAFRTTDVGRKLIIDQNVFIEGTLPMGVVRPLTEVEMDHYREPFLNPVDREPLWRFPNELPIAGEPANIVKLVEEYMDWLHQSPVPKLLFWGTPGVLIPPAEAARLAKSLPNCKAVDIGPGLNLLQEDNPDLIGSEIARWLSTLEISG

SEQ ID NO: 2947 - protein, 277 aa, Synthetic construct; identical to SEQ ID NO: 2940

SEQ ID NO: 2948 - protein, 277 aa, Synthetic construct
MFHYVDVGPRDGTPVLFLHGNPTSSYVWRNIIPHVAPTHRCIAPDLIGMGKSDKPDLGYFFDDHVRFMDAFIEALELEEVVLVIHDWGAALGFHWAKRNPERVKGIAFMEFIRPIPTWDEWPEFARETFQAFRTTDVGRKLIIDQNVFIEGTLPMGVVRPLTEVEMDHYREPFLNPVDREPLWRFPNELPIAGEPANIVALVEEYMDWLHQSPVPKLLFWGTPGVLIPPAEAARLAKSLPNCKAVDIGPGLNLLQEDNPDLIGSEIARWLSTLEISG

SEQ ID NO: 2949 - protein, 277 aa, Synthetic construct
MFHYVDVGPRDGTPVLFLHGNPTSSYVWRNIIPHVAPTHRCIAPDLIGMGKSDKPDLGYFFDDHVRFMDAFIEALELEEVVLVIHDWGSALGFHWAKRYPERVKGIAFMEFIRPIPTWDEWPEFARETFQAFRTTDVGRKLIIDQNVFIEGTLPMGVVRPLTEVEMDHYREPFLNPVDREPLWRFPNELPIAGEPANIVALVEEYMDWLHQSPVPKLLFWGTPGVLIPPAEAARLAKSLPNCKAVDIGPGLNLLQEDNPDLIGSEIARWLSTLEISG

SEQ ID NO: 2950 - protein, 277 aa, Synthetic construct
MFHYVDVGPRDGTPVLFLHGNPTSSYVWRNIIPHVAPTHRCIAPDLIGMGKSDKPDLGYFFDDHVRFMDAFIEALELEEVVLVIHDWGSALGFHWAKRNPERVKGIAFFEFIRPIPTWDEWPEFARETFQAFRTTDVGRKLIIDQNVFIEGTLPMGVVRPLTEVEMDHYREPFLNPVDREPLWRFPNELPIAGEPANIVALVEEYMDWLHQSPVPKLLFWGTPGVLIPPAEAARLAKSLPNCKAVDIGPGLNLLQEDNPDLIGSEIARWLSTLEISG

SEQ ID NO: 2951 - protein, 277 aa, Synthetic construct
MFHYVDVGPRDGTPVLFLHGNPTSSYVWRNIIPHVAPTHRCIAPDLIGMGKSDKPDLGYFFDDHVRFMDAFIEALELEEVVLVIHDWGSALGFHWAKRNPERVKGIAFMEFIRPIPTWDEWPEFARETFQAFRTEDVGRKLIIDQNVFIEGTLPMGVVRPLTEVEMDHYREPFLNPVDREPLWRFPNELPIAGEPANIVALVEEYMDWLHQSPVPKLLFWGTPGVLIPPAEAARLAKSLPNCKAVDIGPGLNLLQEDNPDLIGSEIARWLSTLEISG

SEQ ID NO: 2952 - protein, 277 aa, Synthetic construct
MFHYVDVGPRDGTPVLFLHGNPTSSYVWRNIIPHVAPTHRCIAPDLIGMGKSDKPDLGYFFDDHVRFMDAFIEALELEEVVLVIHDWGSALGFHWAKRNPERVKGIAFMEFIRPIPTWDEWPEFARETFQAFRTTDVGRKLIIDQNVFIEGTLPMGVVRPLTEVEMDHYREPFLNPEDREPLWRFPNELPIAGEPANIVALVEEYMDWLHQSPVPKLLFWGTPGVLIPPAEAARLAKSLPNCKAVDIGPGLNLLQEDNPDLIGSEIARWLSTLEISG

SEQ ID NO: 2953 - protein, 277 aa, Synthetic construct
MFHYVDVGPRDGTPVLFLHGNPTSSYVWRNIIPHVAPTHRCIAPDLIGMGKSDKPDLGYFFDDHVRFMDAFIEALELEEVVLVIHDWGSALGFHWAKRNPERVKGIAFMEFIRPIPTWDEWPEFARETFQAFRTTDVGRKLIIDQNVFIEGTLPMGVVRPLTEVEMDHYREPFLNPVDREPLWRFPNELPIAGEPANIVKLVEEYMDWLHQSPVPKLLFWGTPGVLIPPAEAARLAKSLPNCKAVDIGPGLNLLQEDNPDLIGSEIARWLSTLEISG

SEQ ID NO: 2954 - protein, 277 aa, Synthetic construct; identical to SEQ ID NO: 2941

SEQ ID NO: 2955 - protein, 277 aa, Synthetic construct; identical to SEQ ID NO: 2948

SEQ ID NO: 2956 - protein, 277 aa, Synthetic construct
MFHYVDVGPRDGTPVLFLHGNPTSSYVWRNIIPHVAPTHRCIAPDLIGMGKSDKPDLGYFFDDHVRFMDAFIEALGLEEVVLVIHDWGAALGFHWAKRYPERVKGIAFMEFIRPIPTWDEWPEFARETFQAFRTTDVGRKLIIDQNVFIEGTLPMGVVRPLTEVEMDHYREPFLNPVDREPLWRFPNELPIAGEPANIVALVEEYMDWLHQSPVPKLLFWGTPGVLIPPAEAARLAKSLPNCKAVDIGPGLNLLQEDNPDLIGSEIARWLSTLEISG

SEQ ID NO: 2957 - protein, 277 aa, Synthetic construct
MFHYVDVGPRDGTPVLFLHGNPTSSYVWRNIIPHVAPTHRCIAPDLIGMGKSDKPDLGYFFDDHVRFMDAFIEALGLEEVVLVIHDWGAALGFHWAKRNPERVKGIAFFEFIRPIPTWDEWPEFARETFQAFRTTDVGRKLIIDQNVFIEGTLPMGVVRPLTEVEMDHYREPFLNPVDREPLWRFPNELPIAGEPANIVALVEEYMDWLHQSPVPKLLFWGTPGVLIPPAEAARLAKSLPNCKAVDIGPGLNLLQEDNPDLIGSEIARWLSTLEISG

SEQ ID NO: 2958 - protein, 277 aa, Synthetic construct
MFHYVDVGPRDGTPVLFLHGNPTSSYVWRNIIPHVAPTHRCIAPDLIGMGKSDKPDLGYFFDDHVRFMDAFIEALGLEEVVLVIHDWGAALGFHWAKRNPERVKGIAFMEFIRPIPTWDEWPEFARETFQAFRTEDVGRKLIIDQNVFIEGTLPMGVVRPLTEVEMDHYREPFLNPVDREPLWRFPNELPIAGEPANIVALVEEYMDWLHQSPVPKLLFWGTPGVLIPPAEAARLAKSLPNCKAVDIGPGLNLLQEDNPDLIGSEIARWLSTLEISG

SEQ ID NO: 2959 - protein, 277 aa, Synthetic construct
MFHYVDVGPRDGTPVLFLHGNPTSSYVWRNIIPHVAPTHRCIAPDLIGMGKSDKPDLGYFFDDHVRFMDAFIEALGLEEVVLVIHDWGAALGFHWAKRNPERVKGIAFMEFIRPIPTWDEWPEFARETFQAFRTTDVGRKLIIDQNVFIEGTLPMGVVRPLTEVEMDHYREPFLNPEDREPLWRFPNELPIAGEPANIVALVEEYMDWLHQSPVPKLLFWGTPGVLIPPAEAARLAKSLPNCKAVDIGPGLNLLQEDNPDLIGSEIARWLSTLEISG

SEQ ID NO: 2960 - protein, 277 aa, Synthetic construct
MFHYVDVGPRDGTPVLFLHGNPTSSYVWRNIIPHVAPTHRCIAPDLIGMGKSDKPDLGYFFDDHVRFMDAFIEALGLEEVVLVIHDWGAALGFHWAKRNPERVKGIAFMEFIRPIPTWDEWPEFARETFQAFRTTDVGRKLIIDQNVFIEGTLPMGVVRPLTEVEMDHYREPFLNPVDREPLWRFPNELPIAGEPANIVKLVEEYMDWLHQSPVPKLLFWGTPGVLIPPAEAARLAKSLPNCKAVDIGPGLNLLQEDNPDLIGSEIARWLSTLEISG

SEQ ID NO: 2961 - protein, 277 aa, Synthetic construct; identical to SEQ ID NO: 2942

SEQ ID NO: 2962 - protein, 277 aa, Synthetic construct; identical to SEQ ID NO: 2949

SEQ ID NO: 2963 - protein, 277 aa, Synthetic construct; identical to SEQ ID NO: 2956

SEQ ID NO: 2964 - protein, 277 aa, Synthetic construct
MFHYVDVGPRDGTPVLFLHGNPTSSYVWRNIIPHVAPTHRCIAPDLIGMGKSDKPDLGYFFDDHVRFMDAFIEALGLEEVVLVIHDWGSALGFHWAKRYPERVKGIAFFEFIRPIPTWDEWPEFARETFQAFRTTDVGRKLIIDQNVFIEGTLPMGVVRPLTEVEMDHYREPFLNPVDREPLWRFPNELPIAGEPANIVALVEEYMDWLHQSPVPKLLFWGTPGVLIPPAEAARLAKSLPNCKAVDIGPGLNLLQEDNPDLIGSEIARWLSTLEISG

SEQ ID NO: 2965 - protein, 277 aa, Synthetic construct
MFHYVDVGPRDGTPVLFLHGNPTSSYVWRNIIPHVAPTHRCIAPDLIGMGKSDKPDLGYFFDDHVRFMDAFIEALGLEEVVLVIHDWGSALGFHWAKRYPERVKGIAFMEFIRPIPTWDEWPEFARETFQAFRTEDVGRKLIIDQNVFIEGTLPMGVVRPLTEVEMDHYREPFLNPVDREPLWRFPNELPIAGEPANIVALVEEYMDWLHQSPVPKLLFWGTPGVLIPPAEAARLAKSLPNCKAVDIGPGLNLLQEDNPDLIGSEIARWLSTLEISG

SEQ ID NO: 2966 - protein, 277 aa, Synthetic construct
MFHYVDVGPRDGTPVLFLHGNPTSSYVWRNIIPHVAPTHRCIAPDLIGMGKSDKPDLGYFFDDHVRFMDAFIEALGLEEVVLVIHDWGSALGFHWAKRYPERVKGIAFMEFIRPIPTWDEWPEFARETFQAFRTTDVGRKLIIDQNVFIEGTLPMGVVRPLTEVEMDHYREPFLNPEDREPLWRFPNELPIAGEPANIVALVEEYMDWLHQSPVPKLLFWGTPGVLIPPAEAARLAKSLPNCKAVDIGPGLNLLQEDNPDLIGSEIARWLSTLEISG

SEQ ID NO: 2967 - protein, 277 aa, Synthetic construct
MFHYVDVGPRDGTPVLFLHGNPTSSYVWRNIIPHVAPTHRCIAPDLIGMGKSDKPDLGYFFDDHVRFMDAFIEALGLEEVVLVIHDWGSALGFHWAKRYPERVKGIAFMEFIRPIPTWDEWPEFARETFQAFRTTDVGRKLIIDQNVFIEGTLPMGVVRPLTEVEMDHYREPFLNPVDREPLWRFPNELPIAGEPANIVKLVEEYMDWLHQSPVPKLLFWGTPGVLIPPAEAARLAKSLPNCKAVDIGPGLNLLQEDNPDLIGSEIARWLSTLEISG

SEQ ID NO: 2968 - protein, 277 aa, Synthetic construct; identical to SEQ ID NO: 2943

SEQ ID NO: 2969 - protein, 277 aa, Synthetic construct; identical to SEQ ID NO: 2950

SEQ ID NO: 2970 - protein, 277 aa, Synthetic construct; identical to SEQ ID NO: 2957

SEQ ID NO: 2971 - protein, 277 aa, Synthetic construct; identical to SEQ ID NO: 2964

SEQ ID NO: 2972 - protein, 277 aa, Synthetic construct
MFHYVDVGPRDGTPVLFLHGNPTSSYVWRNIIPHVAPTHRCIAPDLIGMGKSDKPDLGYFFDDHVRFMDAFIEALGLEEVVLVIHDWGSALGFHWAKRNPERVKGIAFFEFIRPIPTWDEWPEFARETFQAFRTEDVGRKLIIDQNVFIEGTLPMGVVRPLTEVEMDHYREPFLNPVDREPLWRFPNELPIAGEPANIVALVEEYMDWLHQSPVPKLLFWGTPGVLIPPAEAARLAKSLPNCKAVDIGPGLNLLQEDNPDLIGSEIARWLSTLEISG

SEQ ID NO: 2973 - protein, 277 aa, Synthetic construct
MFHYVDVGPRDGTPVLFLHGNPTSSYVWRNIIPHVAPTHRCIAPDLIGMGKSDKPDLGYFFDDHVRFMDAFIEALGLEEVVLVIHDWGSALGFHWAKRNPERVKGIAFFEFIRPIPTWDEWPEFARETFQAFRTTDVGRKLIIDQNVFIEGTLPMGVVRPLTEVEMDHYREPFLNPEDREPLWRFPNELPIAGEPANIVALVEEYMDWLHQSPVPKLLFWGTPGVLIPPAEAARLAKSLPNCKAVDIGPGLNLLQEDNPDLIGSEIARWLSTLEISG

SEQ ID NO: 2974 - protein, 277 aa, Synthetic construct
MFHYVDVGPRDGTPVLFLHGNPTSSYVWRNIIPHVAPTHRCIAPDLIGMGKSDKPDLGYFFDDHVRFMDAFIEALGLEEVVLVIHDWGSALGFHWAKRNPERVKGIAFFEFIRPIPTWDEWPEFARETFQAFRTTDVGRKLIIDQNVFIEGTLPMGVVRPLTEVEMDHYREPFLNPVDREPLWRFPNELPIAGEPANIVKLVEEYMDWLHQSPVPKLLFWGTPGVLIPPAEAARLAKSLPNCKAVDIGPGLNLLQEDNPDLIGSEIARWLSTLEISG

SEQ ID NO: 2975 - protein, 277 aa, Synthetic construct; identical to SEQ ID NO: 2944

SEQ ID NO: 2976 - protein, 277 aa, Synthetic construct; identical to SEQ ID NO: 2951

SEQ ID NO: 2977 - protein, 277 aa, Synthetic construct; identical to SEQ ID NO: 2958

SEQ ID NO: 2978 - protein, 277 aa, Synthetic construct; identical to SEQ ID NO: 2965

SEQ ID NO: 2979 - protein, 277 aa, Synthetic construct; identical to SEQ ID NO: 2972

SEQ ID NO: 2980 - protein, 277 aa, Synthetic construct
MFHYVDVGPRDGTPVLFLHGNPTSSYVWRNIIPHVAPTHRCIAPDLIGMGKSDKPDLGYFFDDHVRFMDAFIEALGLEEVVLVIHDWGSALGFHWAKRNPERVKGIAFMEFIRPIPTWDEWPEFARETFQAFRTEDVGRKLIIDQNVFIEGTLPMGVVRPLTEVEMDHYREPFLNPEDREPLWRFPNELPIAGEPANIVALVEEYMDWLHQSPVPKLLFWGTPGVLIPPAEAARLAKSLPNCKAVDIGPGLNLLQEDNPDLIGSEIARWLSTLEISG

SEQ ID NO: 2981 - protein, 277 aa, Synthetic construct
MFHYVDVGPRDGTPVLFLHGNPTSSYVWRNIIPHVAPTHRCIAPDLIGMGKSDKPDLGYFFDDHVRFMDAFIEALGLEEVVLVIHDWGSALGFHWAKRNPERVKGIAFMEFIRPIPTWDEWPEFARETFQAFRTEDVGRKLIIDQNVFIEGTLPMGVVRPLTEVEMDHYREPFLNPVDREPLWRFPNELPIAGEPANIVKLVEEYMDWLHQSPVPKLLFWGTPGVLIPPAEAARLAKSLPNCKAVDIGPGLNLLQEDNPDLIGSEIARWLSTLEISG

SEQ ID NO: 2982 - protein, 277 aa, Synthetic construct; identical to SEQ ID NO: 2945

SEQ ID NO: 2983 - protein, 277 aa, Synthetic construct; identical to SEQ ID NO: 2952

SEQ ID NO: 2984 - protein, 277 aa, Synthetic construct; identical to SEQ ID NO: 2959

SEQ ID NO: 2985 - protein, 277 aa, Synthetic construct; identical to SEQ ID NO: 2966

SEQ ID NO: 2986 - protein, 277 aa, Synthetic construct; identical to SEQ ID NO: 2973

SEQ ID NO: 2987 - protein, 277 aa, Synthetic construct; identical to SEQ ID NO: 2980

SEQ ID NO: 2988 - protein, 277 aa, Synthetic construct
MFHYVDVGPRDGTPVLFLHGNPTSSYVWRNIIPHVAPTHRCIAPDLIGMGKSDKPDLGYFFDDHVRFMDAFIEALGLEEVVLVIHDWGSALGFHWAKRNPERVKGIAFMEFIRPIPTWDEWPEFARETFQAFRTTDVGRKLIIDQNVFIEGTLPMGVVRPLTEVEMDHYREPFLNPEDREPLWRFPNELPIAGEPANIVKLVEEYMDWLHQSPVPKLLFWGTPGVLIPPAEAARLAKSLPNCKAVDIGPGLNLLQEDNPDLIGSEIARWLSTLEISG

SEQ ID NO: 2989 - protein, 277 aa, Synthetic construct; identical to SEQ ID NO: 2946

SEQ ID NO: 2990 - protein, 277 aa, Synthetic construct; identical to SEQ ID NO: 2953

SEQ ID NO: 2991 - protein, 277 aa, Synthetic construct; identical to SEQ ID NO: 2960

SEQ ID NO: 2992 - protein, 277 aa, Synthetic construct; identical to SEQ ID NO: 2967

SEQ ID NO: 2993 - protein, 277 aa, Synthetic construct; identical to SEQ ID NO: 2974

SEQ ID NO: 2994 - protein, 277 aa, Synthetic construct; identical to SEQ ID NO: 2981

SEQ ID NO: 2995 - protein, 277 aa, Synthetic construct; identical to SEQ ID NO: 2988

SEQ ID NO: 2996 - protein, 277 aa, Synthetic construct
MFHYVDVGPRDGTPVLFLHGNPTSSYVWRNIIPHVSPTHRCIAPDLIGMGKSGKPDLGYFFDDHVRFMDAFIEALGLEEVVLVIHDWGSALGFHWAKRNPERVKGIAFMEFIRPIPTWDEWPEFARETFQAFRTTDVGRKLIIDQNVFIEGTLPMGVVRPLTEVEMDHYREPFLNPADREPLWRFPNELPIAGEPANIVALVEEYMDWLHQSPVPKLLFWGTPGVLIPPAEAARLAKSLPNCKAVDIGPGLNLLQEDNPDLIGSEIARWLSTLEISG

SEQ ID NO: 2997 - protein, 277 aa, Synthetic construct
MFHYVDEGPRDGTPVLFLHGNPTSSYVWRNIIPHVSPTHRCIAPDLIGMGKSDKPDLGYFFDDHVRFMDAFIEALGLEEVVLVIHDWGSALGFHWAKRNPERVKGIAFMEFIRPIPTWDEWPEFARETFQAFRTTDVGRKLIIDQNVFIEGTLPMGVVRPLTEVEMDHYREPFLNPADREPLWRFPNELPIAGEPANIVALVEEYMDWLHQSPVPKLLFWGTPGVLIPPAEAARLAKSLPNCKAVDIGPGLNLLQEDNPDLIGSEIARWLSTLEISG

SEQ ID NO: 2998 - protein, 277 aa, Synthetic construct
MFHYVDEGPRDGTPVLFLHGNPTSSYVWRNIIPHVSPTHRCIAPDLIGMGKSGKPDLGYFFDDHVRFMDAFIEALGLEEVVLVIHDWGSALGFHWAKRNPERVKGIAFMEFIRPIPTWDEWPEFARETFQAFRTTDVGRKLIIDQNVFIEGTLPMGVVRPLTEVEMDHYREPFLNPADREPLWRFPNELPIAGEPANIVALVEEYMDWLHQSPVPKLLFWGTPGVLIPPAEAARLAKSLPNCKAVDIGPGLNLLQEDNPDLIGSEIARWLSTLEISG

SEQ ID NO: 2999 - protein, 277 aa, Synthetic construct
MFHYVDEGPRDGTPVLFLHGNPTSSYVWRNIIPHVSPTHRCIAPDLIGMGKSDKPDLGYFFDDHVRFMDAFIEALGLEEVVLVIHDWGSALGFHWAKRNPERVKGIAFMEFIRPIPTWDEWPEFARETFQAFRTTDVGRKLIIDQNVFIEGTLPMGVVRPLTEVEMDHYREPFLNPADREPLWRFPNELPIAGEPANIVALVEEYMDWLHQSPVPKLLFWGTPGVLIPPAEAARLAKSLPNCKAVDIGPGLNLLQEDNPDLIGAEIARWLSTLEISG

SEQ ID NO: 3000 - protein, 277 aa, Synthetic construct
MFHYVDEGPRDGTPVLFLHGNPTSSYVWRNIIPHVSPTHRCIAPDLIGMGKSDKPDLGYFFDDHVRFMDAFIEALGLEEVVLVIHDWGSALGFHWAKRNPERVKGIAFMEFIRPIPTWDEWPEFARETFQAFRTTDVGRKLIIDQNVFIEGTLPMGVVRPLTEVEMDHYREPFLNPADREPLWRFPNELPIAGEPANIVALVEEYMDWLHQSPVPKLLFWGTPGVLIPPAEAARLAKTLPNCKAVDIGPGLNLLQEDNPDLIGSEIARWLSTLEISG

SEQ ID NO: 3001 - protein, 277 aa, Synthetic construct
MFHYVDVGPRDGTPVLFLHGNPTSSYVWRNIIPHVSPTHRCIAPDLIGMGKSGKPDLGYFFDDHVRFMDAFIEALGLEEVVLVIHDWGSALGFHWAKRNPERVKGIAFMEFIRPIPTWDEFPEFARETFQAFRTTDVGRKLIIDQNVFIEGTLPMGVVRPLTEVEMDHYREPFLNPADREPLWRFPNELPIAGEPANVVALVEEYMDWLHQSPVPKLLFWGTPGVLIPPAEAARLAKSLPNCKAVDIGPGLNLLQEDNPDLIGSEIARWLSTLEISG

SEQ ID NO: 3002 - protein, 277 aa, Synthetic construct
MFHYVDVGPRDGTPVLFLHGNPTSSYVWRNIIPHVSPTHRCIAPDLIGMGKSGKPDLGYFFDDHVRFMDAFIEALGLEEVVLVIHDWGSALGFHWAKRNPERVKGIAFMEFIRPIPTWDEWPEFARETFQAFRTTDVGRKLIIDQNVFIEGTLPMGVVRPLTEVEMDHYREPFLNPADREPLWRFPNELPIAGEPANVVALVEEYMDWLHQSPVPKLLFWGTPGVLIPPAEAARLAKSLPNCKAVDIGPGLNLLQEDNPDLIGSEIARWLSTLEISG

SEQ ID NO: 3003 - protein, 277 aa, Synthetic construct
MFHYVDEGPRDGTPVLFLHGNPTSSYVWRNIIPHVSPTHRCIAPDLIGMGKSGKPDLGYFFDDHVRFMDAFIEALGLEEVVLVIHDWGSALGFHWAKRNPERVKGIAFMEFIRPIPTWDEWPEFARETFQAFRTTDVGRKLIIDQNVFIEGTLPMGVVRPLTEVEMDHYREPFLNPADREPLWRFPNELPIAGEPANIVALVEEYMDWLHQSPVPKLLFWGTPGVLIPPAEAARLAKSLPNCKAVDIGPGLNLLQEDNPDLIGAEIARWLSTLEISG

SEQ ID NO: 3004 - protein, 277 aa, Synthetic construct
MFHYVDVGPRDGTPVLFLHGNPTSSYVWRNIIPHVAPTHRCIAPDLIGMGKSGKPDLGYFFDDHVRFMDAFIEAMGLEEVVLVIHDWGSALGFHWAKRNPERVKGIAFMEFIRPIPTWDEWPEFARETFQAFRTTDVGRKLIIDQNVFIEGTLPMGVVRPLTEVEMDHYREPFLNPADREPLWRFPNELPIAGEPANIVALVEEYMDWLHQSPVPKLLFWGTPGVLIPPAEAARLAKSLPNCKAVDIGPGLNLLQEDNPDLIGSEIARWLSTLEISG

SEQ ID NO: 3005 - protein, 277 aa, Synthetic construct
MFHYVDVGPRDGTPVLFLHGNPTSSYVWRNIIPHVAPTHRCIAPDLIGMGKSGKPDLGYFFDDHVRFMDAFIEALGLEEVVLVIHDWGAALGFHWAKRNPERVKGIAFMEFIRPIPTWDEWPEFARETFQAFRTTDVGRKLIIDQNVFIEGTLPMGVVRPLTEVEMDHYREPFLNPADREPLWRFPNELPIAGEPANIVALVEEYMDWLHQSPVPKLLFWGTPGVLIPPAEAARLAKSLPNCKAVDIGPGLNLLQEDNPDLIGSEIARWLSTLEISG

SEQ ID NO: 3006 - protein, 277 aa, Synthetic construct
MFHYVDVGPRDGTPVLFLHGNPTSSYVWRNIIPHVAPTHRCIAPDLIGMGKSGKPDLGYFFDDHVRFMDAFIEALGLEEVVLVIHDWGSALGFHWAKRYPERVKGIAFMEFIRPIPTWDEWPEFARETFQAFRTTDVGRKLIIDQNVFIEGTLPMGVVRPLTEVEMDHYREPFLNPADREPLWRFPNELPIAGEPANIVALVEEYMDWLHQSPVPKLLFWGTPGVLIPPAEAARLAKSLPNCKAVDIGPGLNLLQEDNPDLIGSEIARWLSTLEISG

SEQ ID NO: 3007 - protein, 277 aa, Synthetic construct
MFHYVDVGPRDGTPVLFLHGNPTSSYVWRNIIPHVSPTHRCIAPDLIGMGKSGKPDLGYFFDDHVRFMDAFIEAMGLEEVVLVIHDWGSALGFHWAKRNPERVKGIAFMEFIRPIPTWDEWPEFARETFQAFRTTDVGRKLIIDQNVFIEGTLPMGVVRPLTEVEMDHYREPFLNPADREPLWRFPNELPIAGEPANIVALVEEYMDWLHQSPVPKLLFWGTPGVLIPPAEAARLAKSLPNCKAVDIGPGLNLLQEDNPDLIGSEIARWLSTLEISG

SEQ ID NO: 3008 - protein, 277 aa, Synthetic construct
MFHYVDVGPRDGTPVLFLHGNPTSSYVWRNIIPHVSPTHRCIAPDLIGMGKSGKPDLGYFFDDHVRFMDAFIEALGLEEVVLVIHDWGAALGFHWAKRNPERVKGIAFMEFIRPIPTWDEWPEFARETFQAFRTTDVGRKLIIDQNVFIEGTLPMGVVRPLTEVEMDHYREPFLNPADREPLWRFPNELPIAGEPANIVALVEEYMDWLHQSPVPKLLFWGTPGVLIPPAEAARLAKSLPNCKAVDIGPGLNLLQEDNPDLIGSEIARWLSTLEISG

SEQ ID NO: 3009 - protein, 277 aa, Synthetic construct
MFHYVDVGPRDGTPVLFLHGNPTSSYVWRNIIPHVSPTHRCIAPDLIGMGKSGKPDLGYFFDDHVRFMDAFIEALGLEEVVLVIHDWGSALGFHWAKRYPERVKGIAFMEFIRPIPTWDEWPEFARETFQAFRTTDVGRKLIIDQNVFIEGTLPMGVVRPLTEVEMDHYREPFLNPADREPLWRFPNELPIAGEPANIVALVEEYMDWLHQSPVPKLLFWGTPGVLIPPAEAARLAKSLPNCKAVDIGPGLNLLQEDNPDLIGSEIARWLSTLEISG

SEQ ID NO: 3010 - protein, 277 aa, Synthetic construct
MMHYVDEGPRDGTPVLFLHGNPTSSYVWRNIIPHVAPTHRCIAPDLIGMGKSDKPDLGYFFDDHVRFMDAFIEALGLEEVVLVIHDWGSALGFHWAKRNPERVKGIAFMEFIRPIPTWDEWPEFARETFQAFRTTDVGRKLIIDHNVFIEGTLRMGVVRPLTEVEMDHYREPFLNPVDREPLWRFPNELPIAGEPANIVALVEEYMDWLHQSPVPKLLFWGTPGVLIPPAEAARLAKTLPNCKAVDIGPGLNLLQEDNPDLIGAEIARWLSTLEISG

SEQ ID NO: 3011 - protein, 277 aa, Synthetic construct
MMHYVDEGPRDGTPVLFLHGNPTSSYVWRNIIPHVAPTHRCIAPDLIGMGKSGKPDLGYFFDDHVRFMDAFIEALGLEEVVLVIHDWGSALGFHWAKRNPERVKGIAFMEFIRPIPTWDEWPEFARETFQAFRTTDVGRKLIIDHNVFIEGTLRMGVVRPLTEVEMDHYREPFLNPVDREPLWRFPNELPIAGEPANIVALVEEYMDWLHQSPVPKLLFWGTPGVLIPPAEAARLAKTLPNCKAVDIGPGLNLLQEDNPDLIGSEIARWLSTLEISG

SEQ ID NO: 3012 - protein, 277 aa, Synthetic construct
MMHYVDEGPRDGTPVLFLHGNPTSSYVWRNIIPHVAPTHRCIAPDLIGMGKSDKPDLGYFFDDHVRFMDAFIEALGLEEVVLVIHDWGSALGFHWAKRNPERVKGIAFMEFIRPIPTWDEWPEFARETFQAFRTTDVGRKLIIDHNVFIEGTLRMGVVRPLTEVEMDHYREPFLNPADREPLWRFPNELPIAGEPANIVALVEEYMDWLHQSPVPKLLFWGTPGVLIPPAEAARLAKTLPNCKAVDIGPGLNLLQEDNPDLIGSEIARWLSTLEISG

SEQ ID NO: 3013 - protein, 277 aa, Synthetic construct
MMHYVDEGPRDGTPVLFLHGNPTSSYVWRNIIPHVAPTHRCIAPDLIGMGKSDKPDLGYFFDDHVRFMDAFIEALGLEEVVLVIHDWGSALGFHWAKRNPERVKGIAFMEFIRPIPTWDEFPEFARETFQAFRTTDVGRKLIIDHNVFIEGTLRMGVVRPLTEVEMDHYREPFLNPVDREPLWRFPNELPIAGEPANIVALVEEYMDWLHQSPVPKLLFWGTPGVLIPPAEAARLAKTLPNCKAVDIGPGLNLLQEDNPDLIGSEIARWLSTLEISG

SEQ ID NO: 3014 - protein, 277 aa, Synthetic construct
MMHYVDEGPRDGTPVLFLHGNPTSSYVWRNIIPHVAPTHRCIAPDLIGMGKSDKPDLGYFFDDHVRFMDAFIEALGLEEVVLVIHDWGSALGFHWAKRNPERVKGIAFMEFIRPIPTWDEWPEFARETFQAFRTTDVGRKLIIDHNVFIEGTLRMGVVRPLTEVEMDHYREPFLNPVDREPLWRFPNELPIAGEPANVVALVEEYMDWLHQSPVPKLLFWGTPGVLIPPAEAARLAKTLPNCKAVDIGPGLNLLQEDNPDLIGSEIARWLSTLEISG

SEQ ID NO: 3015 - protein, 277 aa, Synthetic construct
MMHYVDEGPRDGTPVLFLHGNPTSSYVWRNIIPHVAPTHRCIAPDLIGMGKSGKPDLGYFFDDHVRFMDAFIEALGLEEVVLVIHDWGSALGFHWAKRNPERVKGIAFMEFIRPIPTWDEWPEFARETFQAFRTTDVGRKLIIDHNVFIEGTLRMGVVRPLTEVEMDHYREPFLNPADREPLWRFPNELPIAGEPANIVALVEEYMDWLHQSPVPKLLFWGTPGVLIPPAEAARLAKTLPNCKAVDIGPGLNLLQEDNPDLIGSEIARWLSTLEISG

SEQ ID NO: 3016 - protein, 277 aa, Synthetic construct
MMHYVDEGPRDGTPVLFLHGNPTSSYVWRNIIPHVAPTHRCIAPDLIGMGKSDKPDLGYFFDDHVRFMDAFIEALGLEEVVLVIHDWGSALGFHWAKRNPERVKGIAFMEFIRPIPTWDEFPEFARETFQAFRTTDVGRKLIIDHNVFIEGTLRMGVVRPLTEVEMDHYREPFLNPVDREPLWRFPNELPIAGEPANVVALVEEYMDWLHQSPVPKLLFWGTPGVLIPPAEAARLAKTLPNCKAVDIGPGLNLLQEDNPDLIGSEIARWLSTLEISG

SEQ ID NO: 3017 - protein, 277 aa, Synthetic construct
MMHYVDEGPRDGTPVLFLHGNPTSSYVWRNIIPHVAPTHRCIAPDLIGMGKSGKPDLGYFFDDHVRFMDAFIEALGLEEVVLVIHDWGSALGFHWAKRNPERVKGIAFMEFIRPIPTWDEWPEFARETFQAFRTTDVGRKLIIDHNVFIEGTLRMGVVRPLTEVEMDHYREPFLNPVDREPLWRFPNELPIAGEPANIVALVEEYMDWLHQSPVPKLLFWGTPGVLIPPAEAARLAKSLPNCKAVDIGPGLNLLQEDNPDLIGAEIARWLSTLEISG

SEQ ID NO: 3018 - protein, 277 aa, Synthetic construct
MMHYVDEGPRDGTPVLFLHGNPTSSYVWRNIIPHVAPTHRCIAPDLIGMGKSDKPDLGYFFDDHVRFMDAFIEALGLEEVVLVIHDWGSALGFHWAKRNPERVKGIAFMEFIRPIPTWDEWPEFARETFQAFRTTDVGRKLIIDHNVFIEGTLRMGVVRPLTEVEMDHYREPFLNPADREPLWRFPNELPIAGEPANIVALVEEYMDWLHQSPVPKLLFWGTPGVLIPPAEAARLAKSLPNCKAVDIGPGLNLLQEDNPDLIGAEIARWLSTLEISG

SEQ ID NO: 3019 - protein, 277 aa, Synthetic construct
MMHYVDEGPRDGTPVLFLHGNPTSSYVWRNIIPHVAPTHRCIAPDLIGMGKSDKPDLGYFFDDHVRFMDAFIEALGLEEVVLVIHDWGSALGFHWAKRNPERVKGIAFMEFIRPIPTWDEFPEFARETFQAFRTTDVGRKLIIDHNVFIEGTLRMGVVRPLTEVEMDHYREPFLNPVDREPLWRFPNELPIAGEPANIVALVEEYMDWLHQSPVPKLLFWGTPGVLIPPAEAARLAKSLPNCKAVDIGPGLNLLQEDNPDLIGAEIARWLSTLEISG

SEQ ID NO: 3020 - protein, 277 aa, Synthetic construct
MMHYVDEGPRDGTPVLFLHGNPTSSYVWRNIIPHVAPTHRCIAPDLIGMGKSDKPDLGYFFDDHVRFMDAFIEALGLEEVVLVIHDWGSALGFHWAKRNPERVKGIAFMEFIRPIPTWDEWPEFARETFQAFRTTDVGRKLIIDHNVFIEGTLRMGVVRPLTEVEMDHYREPFLNPVDREPLWRFPNELPIAGEPANVVALVEEYMDWLHQSPVPKLLFWGTPGVLIPPAEAARLAKSLPNCKAVDIGPGLNLLQEDNPDLIGAEIARWLSTLEISG

SEQ ID NO: 3021 - protein, 277 aa, Synthetic construct
MMHYVDEGPRDGTPVLFLHGNPTSSYVWRNIIPHVAPTHRCIAPDLIGMGKSGKPDLGYFFDDHVRFMDAFIEALGLEEVVLVIHDWGSALGFHWAKRNPERVKGIAFMEFIRPIPTWDEWPEFARETFQAFRTTDVGRKLIIDHNVFIEGTLRMGVVRPLTEVEMDHYREPFLNPADREPLWRFPNELPIAGEPANIVALVEEYMDWLHQSPVPKLLFWGTPGVLIPPAEAARLAKSLPNCKAVDIGPGLNLLQEDNPDLIGAEIARWLSTLEISG

SEQ ID NO: 3022 - protein, 277 aa, Synthetic construct
MMHYVDEGPRDGTPVLFLHGNPTSSYVWRNIIPHVAPTHRCIAPDLIGMGKSDKPDLGYFFDDHVRFMDAFIEALGLEEVVLVIHDWGSALGFHWAKRNPERVKGIAFMEFIRPIPTWDEFPEFARETFQAFRTTDVGRKLIIDHNVFIEGTLRMGVVRPLTEVEMDHYREPFLNPVDREPLWRFPNELPIAGEPANVVALVEEYMDWLHQSPVPKLLFWGTPGVLIPPAEAARLAKSLPNCKAVDIGPGLNLLQEDNPDLIGAEIARWLSTLEISG

SEQ ID NO: 3023 - protein, 277 aa, Synthetic construct
MMHYVDEGPRDGTPVLFLHGNPTSSYVWRNIIPHVAPTHRCIAPDLIGMGKSGKPDLGYFFDDHVRFMDAFIEALGLEEVVLVIHDWGSALGFHWAKRNPERVKGIAFMEFIRPIPTWDEWPEFARETFQAFRTTDVGRKLIIDHNVFIEGTLRMGVVRPLTEVEMDHYREPFLNPADREPLWRFPNELPIAGEPANIVALVEEYMDWLHQSPVPKLLFWGTPGVLIPPAEAARLAKSLPNCKAVDIGPGLNLLQEDNPDLIGSEIARWLSTLEISG

SEQ ID NO: 3024 - protein, 277 aa, Synthetic construct
MMHYVDVGPRDGTPVLFLHGNPTSSYVWRNIIPHVAPTHRCIAPDLIGMGKSGKPDLGYFFDDHVRFMDAFIEALGLEEVVLVIHDWGSALGFHWAKRNPERVKGIAFMEFIRPIPTWDEWPEFARETFQAFRTTDVGRKLIIDHNVFIEGTLRMGVVRPLTEVEMDHYREPFLNPADREPLWRFPNELPIAGEPANIVALVEEYMDWLHQSPVPKLLFWGTPGVLIPPAEAARLAKTLPNCKAVDIGPGLNLLQEDNPDLIGSEIARWLSTLEISG

SEQ ID NO: 3025 - protein, 277 aa, Synthetic construct
MMHYVDVGPRDGTPVLFLHGNPTSSYVWRNIIPHVAPTHRCIAPDLIGMGKSGKPDLGYFFDDHVRFMDAFIEALGLEEVVLVIHDWGSALGFHWAKRNPERVKGIAFMEFIRPIPTWDEWPEFARETFQAFRTTDVGRKLIIDHNVFIEGTLRMGVVRPLTEVEMDHYREPFLNPADREPLWRFPNELPIAGEPANIVALVEEYMDWLHQSPVPKLLFWGTPGVLIPPAEAARLAKSLPNCKAVDIGPGLNLLQEDNPDLIGAEIARWLSTLEISG

SEQ ID NO: 3026 - protein, 277 aa, Synthetic construct
MMHYVDVGPRDGTPVLFLHGNPTSSYVWRNIIPHVAPTHRCIAPDLIGMGKSGKPDLGYFFDDHVRFMDAFIEALGLEEVVLVIHDWGSALGFHWAKRNPERVKGIAFMEFIRPIPTWDEFPEFARETFQAFRTTDVGRKLIIDHNVFIEGTLRMGVVRPLTEVEMDHYREPFLNPADREPLWRFPNELPIAGEPANIVALVEEYMDWLHQSPVPKLLFWGTPGVLIPPAEAARLAKSLPNCKAVDIGPGLNLLQEDNPDLIGSEIARWLSTLEISG

SEQ ID NO: 3027 - protein, 277 aa, Synthetic construct
MMHYVDVGPRDGTPVLFLHGNPTSSYVWRNIIPHVAPTHRCIAPDLIGMGKSGKPDLGYFFDDHVRFMDAFIEALGLEEVVLVIHDWGSALGFHWAKRNPERVKGIAFMEFIRPIPTWDEWPEFARETFQAFRTTDVGRKLIIDHNVFIEGTLRMGVVRPLTEVEMDHYREPFLNPADREPLWRFPNELPIAGEPANVVALVEEYMDWLHQSPVPKLLFWGTPGVLIPPAEAARLAKSLPNCKAVDIGPGLNLLQEDNPDLIGSEIARWLSTLEISG

SEQ ID NO: 3028 - protein, 277 aa, Synthetic construct
MMHYVDVGPRDGTPVLFLHGNPTSSYVWRNIIPHVAPTHRCIAPDLIGMGKSGKPDLGYFFDDHVRFMDAFIEALGLEEVVLVIHDWGSALGFHWAKRNPERVKGIAFMEFIRPIPTWDEFPEFARETFQAFRTTDVGRKLIIDHNVFIEGTLRMGVVRPLTEVEMDHYREPFLNPADREPLWRFPNELPIAGEPANVVALVEEYMDWLHQSPVPKLLFWGTPGVLIPPAEAARLAKSLPNCKAVDIGPGLNLLQEDNPDLIGSEIARWLSTLEISG

SEQ ID NO: 3029 - protein, 277 aa, Synthetic construct
MMHYVDVGPRDGTPVLFLHGNPTSSYVWRNIIPHVAPTHRCIAPDLIGMGKSGKPDLGYFFDDHVRFMDAFIEALGLEEVVLVIHDWGSALGFHWAKRNPERVKGIAFMEFIRPIPTWDEWPEFARETFQAFRTTDVGRKLIIDHNVFIEGTLRMGVVRPLTEVEMDHYREPFLNPADREPLWRFPNELPIAGEPANIVALVEEYMDWLHQSPVPKLLFWGTPGVLIPPAEAARLAKTLPNCKAVDIGPGLNLLQEDNPDLIGAEIARWLSTLEISG

SEQ ID NO: 3030 - protein, 277 aa, Synthetic construct
MMHYVDEGPRDGTPVLFLHGNPTSSYVWRNIIPHVAPTHRCIAPDLIGMGKSDKPDLGYFFDDHVRFMDAFIEALGLEEVVLVIHDWGSALGFHWAKRNPERVKGIAFMEFIRPIPTWDEFPEFARETFQAFRTTDVGRKLIIDHNVFIEGTLRMGVVRPLTEVEMDHYREPFLNPVDREPLWRFPNELPIAGEPANVVALVEEYMDWLHQSPVPKLLFWGTPGVLIPPAEAARLAKSLPNCKAVDIGPGLNLLQEDNPDLIGSEIARWLSTLEISG

SEQ ID NO: 3031 - protein, 277 aa, Synthetic construct
MMHYVDVGPRDGTPVLFLHGNPTSSYVWRNIIPHVAPTHRCIAPDLIGMGKSDKPDLGYFFDDHVRFMDAFIEALGLEEVVLVIHDWGSALGFHWAKRNPERVKGIAFMEFIRPIPTWDEFPEFARETFQAFRTTDVGRKLIIDHNVFIEGTLRMGVVRPLTEVEMDHYREPFLNPVDREPLWRFPNELPIAGEPANVVALVEEYMDWLHQSPVPKLLFWGTPGVLIPPAEAARLAKSLPNCKAVDIGPGLNLLQEDNPDLIGAEIARWLSTLEISG

SEQ ID NO: 3032 - protein, 277 aa, Synthetic construct
MMHYVDVGPRDGTPVLFLHGNPTSSYVWRNIIPHVAPTHRCIAPDLIGMGKSGKPDLGYFFDDHVRFMDAFIEALGLEEVVLVIHDWGSALGFHWAKRNPERVKGIAFMEFIRPIPTWDEFPEFARETFQAFRTTDVGRKLIIDHNVFIEGTLRMGVVRPLTEVEMDHYREPFLNPVDREPLWRFPNELPIAGEPANVVALVEEYMDWLHQSPVPKLLFWGTPGVLIPPAEAARLAKSLPNCKAVDIGPGLNLLQEDNPDLIGSEIARWLSTLEISG

SEQ ID NO: 3033 - protein, 277 aa, Synthetic construct
MMHYVDVGPRDGTPVLFLHGNPTSSYVWRNIIPHVAPTHRCIAPDLIGMGKSDKPDLGYFFDDHVRFMDAFIEALGLEEVVLVIHDWGSALGFHWAKRNPERVKGIAFMEFIRPIPTWDEFPEFARETFQAFRTTDVGRKLIIDHNVFIEGTLRMGVVRPLTEVEMDHYREPFLNPADREPLWRFPNELPIAGEPANVVALVEEYMDWLHQSPVPKLLFWGTPGVLIPPAEAARLAKSLPNCKAVDIGPGLNLLQEDNPDLIGSEIARWLSTLEISG

SEQ ID NO: 3034-3035 - skipped (2 entries)

SEQ ID NO: 3036 - protein, 14 aa, Synthetic construct
MGVTGWRLCERILA

SEQ ID NO: 3037 - protein, 159 aa, Synthetic construct
MVFTLEDFVGDWRQTAGYNLDQVLEQGGVSSLFQNLGVSVTPIQRIVLSGENGLKIDIHVIIPYEGLSGDQMGQIEKIFKVVYPVDDHHFKVILHYGTLVIDGVTPNMIDYFGRPYEGIAVFDGKKITVTGTLWNGNKIIDERLINPDGSLLFRVTINV

SEQ ID NO: 3038 - protein, 11 aa, Synthetic construct
VSGWRLFKKIS

SEQ ID NO: 3039 - protein, 11 aa, Synthetic construct
VTGYRLFEEIL

SEQ ID NO: 3040 - protein, 170 aa, Synthetic construct
MVFTLDDFVGDWEQTAAYNLDQVLEQGGVSSLLQNLAVSVTPIMRIVRSGENALKIDIHVIIPYEGLSADQMAQIEEVFKVVYPVDDHHFKVILPYGTLVIDGVTPNKLNYFGRPYEGIAVFDGKKITTTGTLWNGNKIIDERLITPDGSMLFRVTINSVSGWRLFKKIS

SEQ ID NO: 3041 - protein, 170 aa, Synthetic construct
MVFTLDDFVGDWEQTAAYNLDQVLEQGGVSSLLQNLAVSVTPIMRIVRSGENALKIDIHVIIPYEGLSADQMAQIEEVFKVVYPVDDHHFKVILPYGTLVIDGVTPNKLNYFGRPYEGIAVFDGKKITTTGTLWNGNKIIDERLITPDGSMLFRVTINSVTGYRLFEEIL

SEQ ID NO: 3042 - protein, 102 aa, Synthetic construct
MVFTLDDFVGDWEQTAAYNLDQVLEQGGVSSLLQNLAVSVTPIMRIVRSGENALKIDIHVIIPYEGLSADQMAQIEEVFKVVYPVDDHHFKVILPYGTLVID

SEQ ID NO: 3043 - protein, 124 aa, Synthetic construct
MVFTLDDFVGDWEQTAAYNLDQVLEQGGVSSLLQNLAVSVTPIMRIVRSGENALKIDIHVIIPYEGLSADQMAQIEEVFKVVYPVDDHHFKVILPYGTLVIDGVTPNKLNYFGRPYEGIAVFDG

SEQ ID NO: 3044 - protein, 133 aa, Synthetic construct
MVFTLDDFVGDWEQTAAYNLDQVLEQGGVSSLLQNLAVSVTPIMRIVRSGENALKIDIHVIIPYEGLSADQMAQIEEVFKVVYPVDDHHFKVILPYGTLVIDGVTPNKLNYFGRPYEGIAVFDGKKITTTGTL

SEQ ID NO: 3045 - protein, 148 aa, Synthetic construct
MVFTLDDFVGDWEQTAAYNLDQVLEQGGVSSLLQNLAVSVTPIMRIVRSGENALKIDIHVIIPYEGLSADQMAQIEEVFKVVYPVDDHHFKVILPYGTLVIDGVTPNKLNYFGRPYEGIAVFDGKKITTTGTLWNGNKIIDERLITPD

SEQ ID NO: 3046 - protein, 68 aa, Synthetic construct
GVTPNKLNYFGRPYEGIAVFDGKKITTTGTLWNGNKIIDERLITPDGSMLFRVTINSVSGWRLFKKIS

SEQ ID NO: 3047 - protein, 46 aa, Synthetic construct
KKITTTGTLWNGNKIIDERLITPDGSMLFRVTINSVSGWRLFKKIS

SEQ ID NO: 3048 - protein, 37 aa, Synthetic construct
WNGNKIIDERLITPDGSMLFRVTINSVSGWRLFKKIS

SEQ ID NO: 3049 - protein, 22 aa, Synthetic construct
GSMLFRVTINSVSGWRLFKKIS

SEQ ID NO: 3050 - protein, 68 aa, Synthetic construct
GVTPNKLNYFGRPYEGIAVFDGKKITTTGTLWNGNKIIDERLITPDGSMLFRVTINSVTGYRLFEEIL

SEQ ID NO: 3051 - protein, 46 aa, Synthetic construct
KKITTTGTLWNGNKIIDERLITPDGSMLFRVTINSVTGYRLFEEIL

SEQ ID NO: 3052 - protein, 37 aa, Synthetic construct
WNGNKIIDERLITPDGSMLFRVTINSVTGYRLFEEIL

SEQ ID NO: 3053 - protein, 22 aa, Synthetic construct
GSMLFRVTINSVTGYRLFEEIL

SEQ ID NO: 3054 - protein, 22 aa, Synthetic construct
GVTPNKLNYFGRPYEGIAVFDG

SEQ ID NO: 3055 - protein, 9 aa, Synthetic construct
KKITTTGTL

SEQ ID NO: 3056 - protein, 15 aa, Synthetic construct
WNGNKIIDERLITPD

SEQ ID NO: 3057 - protein, 11 aa, Synthetic construct
VTGYRLFEEIL

SEQ ID NO: 3058 - protein, 11 aa, Synthetic construct
VSGWRLFKKIS

SEQ ID NO: 3059 - protein, 11 aa, Synthetic construct
GSMLFRVTINS

SEQ ID NO: 3060 - protein, 11 aa, Synthetic construct
VSGWRLFKKIS

SEQ ID NO: 3061 - protein, 201 aa, Synthetic construct
MAGDLSAGFFMEELNTYRQKQGVVLKYQELPNSGPPHDRRFTFQVIIDGREFPEGEGRSKKEAKNAAAKLAVEILNKEKKAVSPLLLTTTNSSEGLSMGNYIGLINRIAQKKRLTVNYEQCASGVHGPEGFHYKCKMGQKEYSIGTGSTKQEAKQLAAKLAYLQILSEETSVKSDYLSSGSFATTCESQSNSLVTSTLASE

SEQ ID NO: 3062 - protein, 69 aa, Synthetic construct
FFMEELNTYRQKQGVVLKYQELPNSGPPHDRRFTFQVIIDGREFPEGEGRSKKEAKNAAAKLAVEILNK

SEQ ID NO: 3063 - protein, 68 aa, Synthetic construct
NYIGLINRIAQKKRLTVNYEQCASGVHGPEGFHYKCKMGQKEYSIGTGSTKQEAKQLAAKLAYLQILS

SEQ ID NO: 3064 - protein, 18 aa, Synthetic construct
VSQGSSGGGGSGGGGSSG

SEQ ID NO: 3065 - protein, 377 aa, Synthetic construct
MAGDLSAGFFMEELNTYRQKQGVVLKYQELPNSGPPHDRRFTFQVIIDGREFPEGEGRSKKEAKNAAAKLAVEILNKEKKAVSPLLLTTTNSSEGLSMGNYIGLINRIAQKKRLTVNYEQCASGVHGPEGFHYKCKMGQKEYSIGTGSTKQEAKQLAAKLAYLQILSEETSVKSDYLSSGSFATTCESQSNSLVTSTLASEVSQGSSGGGGSGGGGSSGVFTLEDFVGDWEQTAAYNLDQVLEQGGVSSLLQNLAVSVTPIQRIVRSGENALKIDIHVIIPYEGLSADQMAQIEEVFKVVYPVDDHHFKVILPYGTLVIDGVTPNMLNYFGRPYEGIAVFDGKKITVTGTLWNGNKIIDERLITPDGSMLFRVTINS

SEQ ID NO: 3066 - protein, 230 aa, Synthetic construct
MAGDLSAGFFMEELNTYRQKQGVVLKYQELPNSGPPHDRRFTFQVIIDGREFPEGEGRSKKEAKNAAAKLAVEILNKEKKAVSPLLLTTTNSSEGLSMGNYIGLINRIAQKKRLTVNYEQCASGVHGPEGFHYKCKMGQKEYSIGTGSTKQEAKQLAAKLAYLQILSEETSVKSDYLSSGSFATTCESQSNSLVTSTLASEVSQGSSGGGGSGGGGSSGVTGYRLFEEIL

SEQ ID NO: 3067 - protein, 432 aa, Synthetic construct
MAGDLSAGFFMEELNTYRQKQGVVLKYQELPNSGPPHDRRFTFQVIIDGREFPEGEGRSKKEAKNAAAKLAVEILNKEKKAVSPLLLTTTNSSEGLSMGNYIGLINRIAQKKRLTVNYEQCASGVHGPEGFHYKCKMGQKEYSIGTGSTKQEAKQLAAKLAYLQILSEETSVKSDYLSSGSFATTCESQSNSLVTSTLASEVSQGSSGGGGSGGGGSSGSKGEELFTGVVPILVELDGDVNGHKFSVRGEGEGDATIGKLTLKFICTTGKLPVPWPTLVTTLTYGVQCFSRYPDHMKRHDFFKSAMPEGYVQERTISFKDDGKYKTRAVVKFEGDTLVNRIELKGTDFKEDGNILGHKLEYNFNSHNVYITADKQKNGIKANFTVRHNVEDGSVQLADHYQQNTPIGDGPVLLPDNHYLSTQTVLSKDPNEK

SEQ ID NO: 3068 - protein, 213 aa, Synthetic construct
SKGEELFTGVVPILVELDGDVNGHKFSVRGEGEGDATIGKLTLKFICTTGKLPVPWPTLVTTLTYGVQCFSRYPDHMKRHDFFKSAMPEGYVQERTISFKDDGKYKTRAVVKFEGDTLVNRIELKGTDFKEDGNILGHKLEYNFNSHNVYITADKQKNGIKANFTVRHNVEDGSVQLADHYQQNTPIGDGPVLLPDNHYLSTQTVLSKDPNEK

SEQ ID NO: 3069 - protein, 237 aa, Synthetic construct
MAGDLSAGFFMEELNTYRQKQGVVLKYQELPNSGPPHDRRFTFQVIIDGREFPEGEGRSKKEAKNAAAKLAVEILNKEKKAVSPLLLTTTNSSEGLSMGNYIGLINRIAQKKRLTVNYEQCASGVHGPEGFHYKCKMGQKEYSIGTGSTKQEAKQLAAKLAYLQILSEETSVKSDYLSSGSFATTCESQSNSLVTSTLASEVSQGSSGGGGSGGGGSSGRDHMAAHEYVNAAGITID

SEQ ID NO: 3070 - protein, 18 aa, Synthetic construct
RDHMAAHEYVNAAGITID
